(19) United States
(12) Patent Application Publication
(10) Pub. No.: US 2026/0191922 A1
(43) Pub. Date: Jul. 9, 2026

(54) DISPOSABLE PERSONAL CARE PRODUCTS COMPOSED OF NONWOVEN FABRICS COATED WITH BACTERIOPHAGES TO PREVENT AND REDUCE BACTERIALLY CAUSED SKIN PROBLEMS

(71) Applicant: PARALLEL HEALTH, INC., San Francisco, CA (US)

(72) Inventors: Nathan BROWN, Venice, CA (US); Natalise Kalea ROBINSON, Venice, CA (US)

(21) Appl. No.: 19/134,106

(22) PCT Filed: Nov. 29, 2023
(86) PCT No.: PCT/US2023/081698

§ 371 Date: May 29, 2025

Related U.S. Application Data
(60) Provisional application No. 63/385,398, filed on Nov. 29, 2022.

(51) Int. Cl. A61K 35/76; A61K 9/00; A61K 9/70; D04H 1/435

(52) U.S. Cl. CPC A61K 35/76; A61K 9/0014; A61K 9/70; D04H 1/435; D10B 2331/04; D10B 2401/13; D10B 2509/00

(57) ABSTRACT

Provided herein are compositions of phage combinations attached to surface-active polymer fabrics. The polymer fabrics may be integrated into personal care products. Provided herein are also methods for attaching the phage combinations onto the surface-active polymer fabrics. Methods for selecting the phage combinations are also described. Also provided are methods for using the composition of phage combinations for treating one or more skin conditions.

### 1. CROSS REFERENCE TO RELATED APPLICATIONS

[0001] This application claims the benefit of U.S. Provisional Application No. 63/385,398, filed Nov. 29, 2022, which is hereby incorporated by reference in its entirety.

### 2. SEQUENCE LISTING

[0002] The instant application contains a Sequence Listing which has been submitted electronically in XML format and is hereby incorporated by reference in its entirety. Said XML copy, created on Nov. 28, 2023, is named 54391WO_CRF_sequencelisting, and is 1,895,212 bytes in size.

### 3. BACKGROUND

[0003] Commonplace skin problems such as rashes, sensitive skin, itching, and discoloration are often associated with the use of disposable personal care products made of nonwoven fabrics that occlude the skin. These problems are usually associated with contact dermatitis and manifest in common consumer complaints such as diaper rash, maskne, sanitary pad rash, and incontinence-associated rash. The personal care products associated with these complaints are fitted against the skin for hours at a time and can elevate the pH, temperature, and moisture of the skin. The design of the personal care product itself and the texture of the nonwoven fabric worn closest to the skin have been optimized to wick moisture away from the skin, absorb excess bodily fluids distal from the skin, and reduce irritation from friction. Nonetheless, these products induce changes in skin physiology and the skin microbiome that lead to contact dermatitis and related problems. Occluding the skin increases the viable bacterial count on the skin. It was also found to skew the composition of the bacterial community growing on the skin. Only recently has high-throughput DNA sequencing enabled precise, quantitative measurement of the skin microbiome.

[0004] High-throughput DNA sequencing methods such as shotgun metagenomics allow precise identification of microbial strains and their quantities on the skin. These sequencing methods have been automated and costs have been reduced sufficiently in recent years to allow sequencing of the skin microbiome for large consumer populations. Quantitative, precise population-level data from consumer skin microbiome tests clarifies which microbes are associated with certain kinds of skin problems such as contact dermatitis. The common detrimental microbial species can also be targeted for removal. In this way, large-scale skin microbiome data enables precision engineering of the skin microbiome for a large consumer population.

[0005] Antimicrobials have been added to consumer products for decades, but some of these have recently been banned by the FDA for certain consumer applications. Triclosan and triclocarban were especially common broad-spectrum antimicrobials added to consumer products such as plastic toys, cutting boards, and hygiene products like antibacterial hand soaps. Some of those products included disposable personal care products composed of nonwoven fabrics, such as sanitary pads. However, the antimicrobials were found to be absorbed through the skin, persist in the environment, and exacerbate the spread of antibiotic resistance in bacteria found in the community. In 2016, the FDA banned triclosan and triclocarban from being marketed in over-the-counter consumer antimicrobial hand and body washes. Broad-spectrum small-molecule antimicrobials fell out of favor in consumer markets largely due to their negative side effects on the skin and gut microbiome, human endocrine system, and antibiotic stewardship. Although there is clear consumer demand for effective antimicrobials in consumer products, including disposable consumer products composed of nonwoven fabrics, acceptable options have become limited.

[0006] New, precision antimicrobials with minimal side effects are needed to address contact dermatitis and other conditions caused by disposable personal care products composed of nonwoven fabrics.

### 4. SUMMARY

[0007] Personal products, such as disposable personal care products composed of nonwoven fabrics or materials-such as sanitary pads, diapers, and face masks-occlude the skin, increase total bacterial counts, promote contact dermatitis, and give rise to consumer complaints such as diaper rash, maskne, sanitary pad rash, and incontinence-associated rash. Broad-spectrum, small-molecule antimicrobials previously used to reduce the problem have been banned in some cases of consumer use by the FDA or fallen out of favor with consumers.

[0008] In one aspect, disclosed is a composition comprising a phage combination attached to a polymeric fabric, wherein the phage combination comprises one or more sets of phages that infect one or more bacterial species, wherein the phages are selected from Myoviridae, Podoviridae and Siphoviridae, and wherein the polymeric fabric is selected from at least one of a polyhydroxybutyrate (PHB) or a polyethylene terephthalate (PET) nonwoven fabric.

[0009] A composition comprising a phage combination attached to a polymeric fabric, wherein the phage combination comprises one or more sets of Caudoviricetes phages, and wherein the polymeric fabric is a polyethylene terephthalate (PET) nonwoven fabric.

[0010] In one aspect, disclosed is a composition comprising a phage combination attached to a polymeric fabric, wherein the phage combination comprises at least Staphylococcus aureus infecting phages, and wherein the polymeric fabric is selected from at least one of a polyhydroxybutyrate (PHB) or a polyethylene terephthalate (PET) nonwoven fabric.

[0011] In another aspect, disclosed is a composition comprising a phage combination attached to a polymeric fabric, wherein the phage combination comprises at least Escherichia coli infecting phages, and wherein the polymeric fabric is selected from at least one of a polyhydroxybutyrate (PHB) or a polyethylene terephthalate (PET) nonwoven fabric.

[0012] In another aspect, disclosed is a composition comprising a phage combination attached to a polymeric fabric, wherein the phage combination comprises one or more sets of Caudoviricetes phages, and wherein the polymeric fabric is selected from the group consisting of a polylactic acid (PLA), polyester (PE), polycaprolactone (PCL), acrylics, olefins, polyhydroxyalkanoates (PHA), polyhydroxybutyrate (PHB), polyethylene terephthalate (PET), polypropylene (PP), and polypropylene carbonate (PPC) nonwoven fabric.

[0013] In one aspect, disclosed is a composition comprising a phage combination attached to a polymeric fabric, wherein the phage combination comprises one or more sets of phages that infect one or more bacterial species.

[0014] In accordance with any one of the embodiments, the phages are of the genus Pahexavirus or Rosenblumvirus. The phages can be tailed viruses. In some embodiments, the phages are at least one of Myoviridae or Podoviridae. In some embodiments, the phages are T4 myoviruses. In some embodiments, the phages are podoviruses.

[0015] In accordance with any one of the embodiments, the one or more sets of phages infect at least one common target bacterial species.

[0016] In accordance with any one of the embodiments, each set of phages comprises at least two, three, four, five, or more phages selected from one or more phage libraries, wherein the one or more phage libraries comprise phages from one or more genera.

[0017] In accordance with any one of the embodiments, the phage combination is noncovalently or covalently attached to the polymeric fabric. The polymeric fabric can be synthetic nonwoven fabric.

[0018] In accordance with any one of the embodiments, the phage combination is deposited onto at least one material that forms at least a portion of a personal care product. In some embodiments, the personal care product is selected from a group consisting of facemasks, sanitary pads, tampons, baby diapers, adult incontinence products, or cosmetic facial pads or wipes, fingernail wipes, or patient bathing hygiene textiles.

[0019] In accordance with any one of the embodiments, the bacterial species is commonly associated with contact dermatitis. In some embodiments, the bacterial species is selected from a skin microbiome biobank. In some embodiments, the bacterial species is from a skin microbiome isolated from a biological sample of a subject.

[0020] In accordance with any one of the embodiments, the one or more bacterial species are selected from a population of microorganisms comprising Staphylococcus aureus, Staphylococcus argenteus, Streptococcus pyogenes, Streptococcus pneumoniae, Escherichia coli, Enterococcus faecalis, Cutibacterium acnes, Corynebacterium tuberculostearicum, or combinations thereof.

[0021] In accordance with any one of the embodiments, the phage is an Escherichia coli infecting phage.

[0022] In accordance with any one of the embodiments, the phages are Staphylococcus aureus infecting phages.

[0023] In accordance with any one of the embodiments, the polymeric fabric further comprises a fabric is selected from the group consisting of a polylactic acid (PLA), polyester (PE), polycaprolactone (PCL), acrylics, olefins, polyhydroxyalkanoates (PHA), polyhydroxybutyrate (PHB), polyethylene terephthalate (PET), polypropylene (PP), and polypropylene carbonate (PPC) nonwoven fabric.

[0024] In one aspect, disclosed are methods of selecting the phage combination in accordance with any one of the embodiments.

[0025] In one aspect, disclosed are methods of attaching the phage combination in accordance with any one of the embodiments to a nonwoven polymeric fabric. In some embodiments, attaching the phage combination is achieved by permeating the phage capsid onto the surface of the nonwoven polymeric fabric. The phage capsid can be absorbed to the surface of the polymeric fabric via electrostatic charge. In some embodiments, the tail is exposed away from the fabric.

[0026] In some embodiments, attaching the phage combination is achieved by misting, chemical bonding, physical adsorption, bulk mixing, plasma-treated surface bonding, or a combination thereof.

[0027] In some embodiments, attaching the phage combination is achieved by plasma-treated surface bonding.

[0028] In one aspect, disclosed are methods of preparing a personal care product, the method comprising contacting a nonwoven polymeric fabric with a composition comprising a phage combination, wherein the phage combination comprises one or more sets of phages of Caudoviricetes phages that infect one or more bacterial species, and wherein the nonwoven polymeric fabric is selected from at least one of a polyhydroxybutyrate (PHB) or a polyethylene terephthalate (PET) nonwoven fabric.

[0029] In one aspect, disclosed are methods of preparing a personal care product, the method comprising (a) contacting a nonwoven polymeric fabric with a plasma composition to generate a plasma-treated nonwoven fabric, wherein the nonwoven polymeric fabric is selected from at least one of a polyhydroxybutyrate (PHB) or a polyethylene terephthalate (PET) nonwoven fabric; (b) immobilizing a combination of phages comprising at least one or more sets of Caudoviricetes phages onto the nonwoven polymeric fabric, wherein the phage combination comprises one or more sets of phages that infect one or more bacterial species; and (c) incorporating the nonwoven polymeric fabric into the personal care product.

[0030] In one aspect, disclosed is a nonwoven polymeric fabric comprising a phage combination attached to the polymeric fabric, wherein the phage combination comprises one or more sets of Caudoviricetes phages that infect one or more bacterial species, and wherein the polymeric fabric is selected from a polylactic acid (PLA), polyester (PE), acrylics, olefins, polyhydroxyalkanoates (PHA), polyhydroxybutyrate (PHB), polyethylene terephthalate (PET), polypropylene (PP) and polypropylene carbonate (PPC) nonwoven fabric.

[0031] In one aspect, disclosed are methods for the manufacturing of a personal care product for reducing contact dermatitis, reducing skin infection and/or reducing body odor, the personal care product comprising a nonwoven polymeric fabric, wherein the nonwoven polymeric fabric comprises a phage combination attached to the nonwoven fabric selected from at least one of a polyhydroxybutyrate (PHB) or a polyethylene terephthalate (PET) nonwoven fabric, and wherein the phage combination comprises one or more sets of Caudoviricetes phages that infect one or more bacterial species. In some embodiments, the personal care product is selected from a group consisting of facemasks, sanitary pads, tampons, baby diapers, adult incontinence products, or cosmetic facial pads or wipes, fingernail wipes, or patient bathing hygiene textiles.

[0032] In accordance with any one of the embodiments, the phage of the method, or the phage of the nonwoven polymeric fabric, or the phage of the personal care product, wherein the phage comprises a nucleic acid sequence having at least 80%, 85%, 90%, 95%, 96%, 97%, 98%, or 99% identity with any one of SEQ ID NOs.: 1-132.

[0033] In accordance with any one of the embodiments, the phage of the method, or the phage of the nonwoven polymeric fabric, or the phage of the personal care product, wherein the phage comprises a nucleic acid sequence having at least 95% identity with any one of SEQ ID NOs.: 1-132.

[0034] In accordance with any one of the embodiments, the phage of the method, or the phage of the nonwoven polymeric fabric, or the phage of the personal care product, wherein the phage comprises a nucleic acid sequence having a sequence of any one of SEQ ID NOs.: 1-132.

[0035] Described herein are compositions of bacteriophage mixture and methods of using bacteriophages (phages) as antimicrobial for consumer products, such as disposable consumer products composed of one or more nonwoven fabrics.

[0036] Accordingly, in one aspect, described herein is a composition of one or more phages that infect bacteria on the surface of the skin that are associated with contact dermatitis. In one aspect, described herein is a method for selecting one or more phage combinations to reduce the concentration of bacteria commonly associated with contact dermatitis. In one aspect, described herein is a method for attaching one or more phages combinations to nonwoven fabrics that are incorporated into disposable personal care products.

[0037] These phages infect bacterial species including members of Gram-positive and Gram-negative bacteria. In certain embodiments, the phages infect one or more species including, but are not limited to, members of the Bacillota, Proteobacteria, and Actinobacteria phyla. In certain embodiments, the phages infect one or more species including, but are not limited to, members of the Staphylococcaceae, Streptococcaceae, Enterobacteriaceae, Enterococcaceae, Propionibacteriaceae, and Corynebacteriaceae families. In some embodiments, the phages infect one or more species including, but are not limited to, members of the Staphylococcus, Streptococcus, Escherichia, Enterococcus, Cutibacterium, and Corynebacterium genera. For instance, the phages can infect bacterial species such as Staphylococcus aureus, Staphylococcus argenteus, Streptococcus pyogenes, Streptococcus pneumoniae, Escherichia coli, Enterococcus faecalis, Cutibacterium acnes, and/or Corynebacterium tuberculostearicum. In certain embodiments, the phage infects one or more fungi or viruses (including dsDNA virus). In some embodiments, the phage infects Malassezia yeast. In certain embodiments, the phage infects mites (e.g., Demodex mites). In some embodiments, the phage infects a population of microorganisms including bacteria, fungi, viruses, and/or mites.

[0038] In the composition or method of the preceding embodiment, the phages are noncovalently attached to surface-active nonwoven fabrics integrated into personal care products, though these can be covalently attached, as well. In some embodiments, the personal care product is disposable, non-disposable, or biodegradable. The phages are attached so that the capsid adsorbs to the surface of the nonwoven fabric via electrostatic charge and the tail is exposed away from the surface of the fabric. When the nonwoven fabric of the personal care product comes into contact with the skin, then the exposed phage tail can initiate infection of any susceptible bacteria on the skin.

[0039] In the composition or method of any proceeding embodiment, the combination of multiple phages are attached to plasma surface-treated synthetic nonwoven polymer fabrics including polylactic acid (PLA), polyester (PE), acrylics, olefins, polyhydroxyalkanoate (PHA), polyethylene terephthalate (PET), polypropylene (PP) and polypropylene carbonate (PPC). The surface-treated nonwoven fabric is incorporated in a disposable personal care product that is in close contact with the skin, such as a facemask, sanitary pad, tampon, baby diaper, or adult incontinence products.

[0040] In the composition or method of any preceding embodiment, the phage combination is attached to natural polymer fabric. Non-limiting examples of natural polymer fabrics are silk, wool, DNA, cellulose, and proteins.

[0041] In the composition or method of any preceding embodiment, target bacterial strains from the species Staphylococcus aureus, Staphylococcus argenteus, Streptococcus pyogenes, Streptococcus pneumoniae, Escherichia coli, Enterococcus faecalis, Cutibacterium acnes, and/or Corynebacterium tuberculostearicum are identified from a large shotgun metagenomic dataset of skin microbiome samples collected from contact dermatitis patients. In some embodiments, phages infecting those strains are isolated from environmental samples. In some embodiments, phage isolates are amplified on the target bacterial strain. DNA extractions from the isolates are sequenced to screen the phage genomes for genes related to antibiotic resistance, toxicity, lysogeny, or transduction. Screened phages are tested for host range and combined to maximize host range. In certain embodiments, sets of phages that infect the same host species are tested in pairs for preventing bacterial regrowth in broth culture. In certain embodiments, pairs that prevent bacterial regrowth are selected. In some embodiments, more than two phages or two pairs of phages that prevent bacterial regrowth are selected.

[0042] In the composition or method of any preceding embodiment, phages are concentrated in a low-salt phage buffer before attaching to the nonwoven fabric. In some embodiments, plasma surface treatment is applied to the nonwoven fabric. In some embodiments, the phage buffer is misted onto the surface-treated nonwoven fabric and dried at room temperature. In some embodiments, the nonwoven fabric is incorporated into the disposable personal care product.

### 5. BRIEF DESCRIPTION OF THE SEVERAL VIEWS OF THE DRAWINGS

[0043] These and other features, aspects, and advantages of the present invention will become better understood with regard to the following description, and accompanying drawings.

[0044] FIG. 1 depicts a phage attached to a surface-activated polymer fabric via the negatively charged capsid and the tail is free for binding to a phage receptor presented on a target host bacterial species, which lives in or on the skin surface of a subject. Legend: (1) skin surface; (2) bacterial species targeted for removal; (3) phage receptor on target host bacterial species, including but not limited to Staphylococcus aureus, a coliform, or Cutibacterium acnes; (4) untargeted skin microbial commensal; (5) phage; (6) negative dipole moment of bacteriophage capsid; (7) positive charge of activated surface; (8) nonwoven-fiber activated surface functionalized with immobilized phage; (9) podovirus tailed phage, a distinct phage morphotype from a myovirus tailed phage.

[0045] FIGS. 2A-2C show phages can be attached to plasma-treated PET nonwoven fabric and inhibit bacterial growth. Shown are phage inhibition of Escherichia coli strain 11303 growth on agar plates.

[0046] FIGS. 3A-3C show phages can be attached to plasma-treated PET nonwoven fabric and inhibit bacterial growth. Shown are phage inhibition of Escherichia coli strain 11303 growth on agar plates.

[0047] FIGS. 4A-4C show phages can be attached to plasma-treated PET nonwoven fabric and inhibit bacterial growth. Shown are phage inhibition of Staphylococcus aureus strain 100311 growth on agar plates.

[0048] FIGS. 5A-5C show phages can be attached to plasma-treated PHB nonwoven fabric and inhibit bacterial growth. Shown are phage inhibition of Staphylococcus aureus strain 100311 growth on agar plates.

[0049] FIG. 6 shows effect of T4 myovirus phage attached to plasma-treated PET and PHB nonwoven fibers on Escherichia coli strain 11303.

[0050] FIG. 7 shows effect of S. aureus podovirus Rosenblumvirus P00474 phages attached to plasma-treated PET and PHB nonwoven fibers on Staphylococcus aureus strain 100311.

[0051] FIG. 8 illustrates enablement of inline phage treatment of nonwoven fabrics during manufacturing.

### 6. DETAILED DESCRIPTION

### 6.1. Bacteriophages

[0052] Phages are viruses that infect bacteria. As used herein, the terms “phage” or “bacteriophage” are used interchangeably. Phages were independently discovered in 1915 and 1917 and were used early on in bacteriophage therapy to treat acute bacterial infections. Phages are ubiquitous in the environment, and are a significant component of the skin microbiome. Although they are effective antimicrobials under specific conditions, they are precise in which bacterial species and strains they kill. Broad-spectrum, small-molecule antibiotics have been preferred over phages partly because the data for targeted use of phages has been absent. Only broad-spectrum antimicrobials were practical. Precise, quantitative and population-scale skin microbiome data recast phages as a candidate for precision antimicrobials.

[0053] In various embodiments, the phages described throughout are of the class Caudoviricetes. In some embodiments, the phages belong to genus Pahexavirus. In some embodiments, the phages belong to genus Rosenblumvirus. In some embodiments, the phages are selected from Myoviridae, Siphoviridae, Podovirdae, or Rountreeviridae. In some embodiments, the phages are Myoviridae having long tails that are contractile. In some embodiments, the phages are Podoviridae having short noncontractile tails. In some embodiments, the phages are Siphoviridae having long noncontractile tails. In some embodiments, the phages have a nucleic acid sequence with at least 80%, 85%, 90%, 95%, 96%, 97%, 98%, or 99% identity with any one of SEQ ID NOs.: 1-132. In some embodiments, the phages has a nucleic acid sequence having at least 95% identity with any one of SEQ ID NOs.: 1-132. In some embodiments, the phages have a nucleic acid of any one of SEQ ID NOs.: 1-132.

[0054] In various embodiments, the phage infects a population of microorganisms including bacteria, fungi, viruses, and/or mites. In some embodiments, the population of microorganisms commonly found living on or in the skin sample obtained from a subject. In some embodiments, the population of microorganisms comprises one or more microorganisms associated with acne. In some embodiments, the population of microorganisms comprises one or more microorganisms associated with contact dermatitis, diaper rash, maskne, sanitary pad rash, incontinence-associated rash, inflammation, redness, eczema, rosacea, enlarged hair follicle pore size, rough skin texture, increased trans-epidermal water loss, skin discoloration, or disproportionate elasticity of a stratum corneum and underlying dermis. In some embodiments, the population of microorganisms comprises one or more microorganisms associated with aged skin. In some embodiments, the population of microorganisms comprises a Cutibacterium acnes bacterium. In some embodiments, the population of microorganisms comprises a Staphylococcus aureus bacterium. In some embodiments, the population of microorganisms comprises a Corynebacterium bacterium. In some embodiments, the population of microorganisms comprises a Malassezia yeast. In some embodiments, the population of microorganisms comprises Staphylococcus aureus, Staphylococcus argenteus, Streptococcus pyogenes, Streptococcus pneumoniae, Escherichia coli, Enterococcus faecalis, Cutibacterium acnes, and/or Corynebacterium tuberculostearicum.

[0055] Phages can be attached to nonwoven fabrics. They are attached by activating the surface of the fabric with corona or plasma treatment. Surface activation imparts a charge to the nonwoven fabric, to which phages can be attached noncovalently by electrostatic adsorption. Phages are composed of a capsid that carries the genetic material necessary for infection and a tail that interacts with the bacterial host and facilitates infection. The phage capsid is charged and can be attached to the nonwoven fabric so that the phage tail is exposed, facing away from the surface of the fabric to facilitate infection. Nonwoven fabrics are integrated in disposable personal care products where the products come into contact with the skin. In this orientation, phage tails can infect bacteria on the skin when the nonwoven fabric on the surface of disposable consumer products comes into contact with the skin.

[0056] FIG. 1 illustrates the use of a composition comprising phages as described herein for use in a personal care product. A subject's skin harbors a variety of bacterial species living in or on the skin surface (1) commensally. Phage targets a specific type of bacteria (2) by recognizing the phage receptor (3) presented on a target host bacterial species. It is noted that the nontargeted skin microbial commensal (4) remains uninterrupted. The phage (5) presents a negatively charged capsid (6), which is capable of binding to the positively charged (7) and activated polymer fabric surface (8). The polymer fabric is a nonwoven fiber. The phage (5) is a myovirus tailed phage. The phage (9) is a podovirus tailed phage, a distinct phage morphotype from a myovirus tailed phage. Upon phage attachment, the polymer fabric (e.g., surface activated nonwoven-fiber) (8) is functionalized with the immobilized phage (5) or (9). This particular method of attachment or deposition of the phages allows the phages tails to be presented outward on the fabric since the charged capsid binds the activated polymer fabric surface, allowing the phages to be more effective in bacterial infection.

[0057] In some embodiments, the composition comprises a bacteriophage for fungal virus formulation comprising a set of nucleic acid sequence reads extracted from the genomes of a plurality (e.g., 1, 2, 3, 4, 5, or more) of bacteriophages or fungal viruses and at least one virus is capable of lysing a microorganism of the population of microorganisms identified as living in or on the skin of a subject. Methods and compositions for identifying such microorganisms and bacteriophage targeting the microorganisms are described in WO2022198091A1, which is incorporated by reference herein in its entirety.

### 6.2. Composition

[0058] Described herein are compositions comprising phages attached to fabrics. In certain embodiments, the phages are attached to fabrics, such as polymer fabrics, and incorporated into personal care products. The polymer fabrics can be surface-active nonwoven fabrics. The surface-active nonwoven fabrics can be plasma-treated. The fabrics can be synthetic, artificial, or natural.

[0059] In some embodiments, the polymer fabric comprises a degradable or non-degradable polymer. In some embodiments, the polymer fabric comprises polylactic acid, polyhydroxyalkanoate or polycaprolactone. In some embodiments, the polymer fabric is nonwoven fabric.

[0060] In some embodiments, the composition comprises phages noncovalently attached to surface-active nonwoven fabrics integrated into disposable personal care products. In some embodiments, the composition comprises one or more sets of phage or fungal virus DNA sequences isolated from the skin sample of a subject, and optionally incorporated onto the surface of a personal care product. In some embodiments, the composition comprises one or more sets of phage DNA isolated from a first bacteriophage and a second bacteriophage. In some embodiments, the first bacteriophage and the second bacteriophage are capable of lysing a microorganism of the population of microorganisms. In some embodiments, the first bacteriophage and second bacteriophage individually or collectively prevent resistance or regrowth of the microorganism in vitro.

[0061] In some embodiments, the polymer surface is modified to facilitate phage attachment using plasma treatment alone, plasma treatment followed by activation by 1-ethyl-3-(3-(dimethylamino) propyl) carbodiimide hydrochloride (EDC) and N-hydroxysulfosuccinimide (sulfo-NHS), plasma-initiated acrylic acid grafting, or plasma-initiated acrylic acid grafting with activation by EDC and sulfo-NHS.

[0062] In some embodiments, the first bacteriophage and the second bacteriophage are capable of killing, preventing resistance or regrowth of a population of microorganisms including, but is not limited to, Staphylococcus aureus, Staphylococcus argenteus, Streptococcus pyogenes, Streptococcus pneumoniae, Escherichia coli, Enterococcus faecalis, Cutibacterium acnes, and/or Corynebacterium tuberculostearicum.

[0063] In some embodiments, the first bacteriophage and the second bacteriophage have a different host range. The different host range may comprise at least two C. acnes strains, or the different host range comprise at least one C. acnes strain and at least one C. namnatense strain. In some embodiments, the different host range does not comprise a C. granulosum strain. The first bacteriophage and the second bacteriophage may be lytic bacteriophage. In some embodiments, the bacteriophage or fungal virus formulation is part of a cosmetic formulation. The cosmetic formulation may also comprise one or more liposomes comprising the first bacteriophage and the second bacteriophage. The cosmetic formulation may further comprise an anti-aging component.

[0064] Phage isolates used in formulating phage-functional activated polymer fabric (e.g., nonwoven fabric) surfaces are provided in Table 1.

TABLE 1
Phage isolates for use in formulating phage-functional activated nonwoven fabric surfaces

| Phage | Host | Phage | Host |
|---|---|---|---|
| P00031 | Cutibacterium acnes sp. 100085 | P00060 | Cutibacterium acnes sp. 100119 |
| P00032 | Cutibacterium acnes sp. 100085 | P00061 | Cutibacterium acnes sp. 100119 |
| P00033 | Cutibacterium acnes sp. 100085 | P00062 | Cutibacterium acnes sp. 100124 |
| P00034 | Cutibacterium acnes sp. 100085 | P00063 | Cutibacterium acnes sp. 100124 |
| P00035 | Cutibacterium acnes sp. 100088 | P00064 | Cutibacterium acnes sp. 100124 |
| P00036 | Cutibacterium acnes sp. 100088 | P00065 | Cutibacterium acnes sp. 100124 |
| P00037 | Cutibacterium acnes sp. 100088 | P00066 | Cutibacterium acnes sp. 100126 |
| P00038 | Cutibacterium acnes sp. 100088 | P00067 | Cutibacterium acnes sp. 100126 |
| P00039 | Cutibacterium acnes sp. 100088 | P00068 | Cutibacterium acnes sp. 100126 |
| P00040 | Cutibacterium acnes sp. 100088 | P00069 | Cutibacterium acnes sp. 100126 |
| P00041 | Cutibacterium acnes sp. 100111 | P00070 | Cutibacterium acnes sp. 100132 |
| P00042 | Cutibacterium acnes sp. 100111 | P00071 | Cutibacterium acnes sp. 100132 |
| P00043 | Cutibacterium acnes sp. 100111 | P00072 | Cutibacterium acnes sp. 100132 |
| P00044 | Cutibacterium acnes sp. 100111 | P00073 | Cutibacterium acnes sp. 100132 |
| P00045 | Cutibacterium acnes sp. 100111 | P00074 | Cutibacterium acnes sp. 100132 |
| P00046 | Cutibacterium acnes sp. 100111 | P00075 | Cutibacterium acnes sp. 100144 |
| P00047 | Cutibacterium acnes sp. 100111 | P00076 | Cutibacterium acnes sp. 100144 |
| P00048 | Cutibacterium acnes sp. 100111 | P00077 | Cutibacterium acnes sp. 100144 |
| P00049 | Cutibacterium acnes sp. 100111 | P00078 | Cutibacterium acnes sp. 100144 |
| P00050 | Cutibacterium acnes sp. 100111 | P00079 | Cutibacterium acnes sp. 100144 |
| P00051 | Cutibacterium acnes sp. 100111 | P00080 | Cutibacterium acnes sp. 100144 |
| P00052 | Cutibacterium acnes sp. 100111 | P00081 | Cutibacterium acnes sp. 100144 |
| P00053 | Cutibacterium acnes sp. 100111 | P00082 | Cutibacterium acnes sp. 100144 |
| P00054 | Cutibacterium acnes sp. 100111 | P00083 | Cutibacterium acnes sp. 100144 |
| P00055 | Cutibacterium acnes sp. 100111 | P00084 | Cutibacterium acnes sp. 100144 |
| P00056 | Cutibacterium acnes sp. 100111 | P00085 | Cutibacterium acnes sp. 100146 |
| P00057 | Cutibacterium acnes sp. 100111 | P00086 | Cutibacterium acnes sp. 100146 |
| P00058 | Cutibacterium acnes sp. 100111 | P00087 | Cutibacterium acnes sp. 100146 |
| P00059 | Cutibacterium acnes sp. 100119 | P00088 | Cutibacterium acnes sp. 100146 |
| P00089 | Cutibacterium acnes sp. 100146 | P00202 | Enterococcus faecalis sp. PH100667 |
| P00090 | Cutibacterium acnes sp. 100146 | P00223 | Enterococcus faecalis sp. PH100667 |
| P00091 | Cutibacterium acnes sp. 100146 | P00224 | Enterococcus faecalis sp. PH100667 |
| P00092 | Cutibacterium acnes sp. 100146 | P00235 | Enterococcus faecalis sp. PH100667 |
| P00093 | Cutibacterium acnes sp. 100146 | P00391 | Staphylococcus argenteus sp. PH100253 |
| P00094 | Cutibacterium acnes sp. 100146 | P00392 | Staphylococcus argenteus sp. PH100253 |
| P00095 | Cutibacterium acnes sp. 100146 | P00393 | Staphylococcus argenteus sp. PH100253 |
| P00096 | Cutibacterium acnes sp. 100146 | P00394 | Staphylococcus argenteus sp. PH100253 |
| P00001 | Cutibacterium namnetense sp. 100047 | P00395 | Staphylococcus argenteus sp. PH100253 |
| P00362 | Enterococcus faecalis sp. PH100347 | P00396 | Staphylococcus argenteus sp. PH100253 |
| P00363 | Enterococcus faecalis sp. PH100347 | P00406 | Staphylococcus argenteus sp. PH100286 |
| P00364 | Enterococcus faecalis sp. PH100347 | P00409 | Staphylococcus argenteus sp. PH100286 |
| P00365 | Enterococcus faecalis sp. PH100347 | P00411 | Staphylococcus argenteus sp. PH100286 |
| P00218 | Enterococcus faecalis sp. PH100665 | P00248 | Staphylococcus argenteus sp. PH100315 |
| P00220 | Enterococcus faecalis sp. PH100665 | P00249 | Staphylococcus argenteus sp. PH100315 |
| P00221 | Enterococcus faecalis sp. PH100665 | P00250 | Staphylococcus argenteus sp. PH100315 |
| P00222 | Enterococcus faecalis sp. PH100665 | P00251 | Staphylococcus argenteus sp. PH100315 |
| P00242 | Enterococcus faecalis sp. PH100665 | P00252 | Staphylococcus argenteus sp. PH100315 |
| P00245 | Enterococcus faecalis sp. PH100665 | P00253 | Staphylococcus argenteus sp. PH100315 |
| P00246 | Enterococcus faecalis sp. PH100665 | P00254 | Staphylococcus argenteus sp. PH100315 |
| P00260 | Enterococcus faecalis sp. PH100665 | P00371 | Staphylococcus argenteus sp. PH100351 |
| P00261 | Enterococcus faecalis sp. PH100665 | P00372 | Staphylococcus argenteus sp. PH100351 |
| P00262 | Enterococcus faecalis sp. PH100665 | P00373 | Staphylococcus argenteus sp. PH100351 |
| P00263 | Enterococcus faecalis sp. PH100665 | P00374 | Staphylococcus argenteus sp. PH100351 |
| P00264 | Enterococcus faecalis sp. PH100665 | P00375 | Staphylococcus argenteus sp. PH100351 |
| P00198 | Enterococcus faecalis sp. PH100667 | P00371 | Staphylococcus argenteus sp. PH100352 |
| P00199 | Enterococcus faecalis sp. PH100667 | P00372 | Staphylococcus argenteus sp. PH100352 |
| P00200 | Enterococcus faecalis sp. PH100667 | P00373 | Staphylococcus argenteus sp. PH100352 |
| P00201 | Enterococcus faecalis sp. PH100667 | P00374 | Staphylococcus argenteus sp. PH100352 |
| P00375 | Staphylococcus argenteus sp. PH100352 | P00316 | Staphylococcus aureus sp. PH100342 |
| P00283 | Staphylococcus argenteus sp. PH100533 | P00317 | Staphylococcus aureus sp. PH100342 |
| P00285 | Staphylococcus argenteus sp. PH100533 | P00318 | Staphylococcus aureus sp. PH100342 |
| P00286 | Staphylococcus argenteus sp. PH100533 | P00319 | Staphylococcus aureus sp. PH100342 |
| P00287 | Staphylococcus argenteus sp. PH100533 | P00320 | Staphylococcus aureus sp. PH100342 |
| P00289 | Staphylococcus argenteus sp. PH100533 | P00321 | Staphylococcus aureus sp. PH100342 |
| P00291 | Staphylococcus argenteus sp. PH100533 | P00275 | Staphylococcus aureus sp. PH100669 |
| P00322 | Staphylococcus argenteus sp. PH100533 | P00276 | Staphylococcus aureus sp. PH100669 |
| P00323 | Staphylococcus argenteus sp. PH100533 | P00277 | Staphylococcus aureus sp. PH100669 |
| P00324 | Staphylococcus argenteus sp. PH100533 | P00278 | Staphylococcus aureus sp. PH100669 |
| P00325 | Staphylococcus argenteus sp. PH100533 | P00279 | Staphylococcus aureus sp. PH100669 |
| P00366 | Staphylococcus argenteus sp. PH100533 | P00386 | Staphylococcus aureus sp. PH100669 |
| P00367 | Staphylococcus argenteus sp. PH100533 | P00387 | Staphylococcus aureus sp. PH100669 |
| P00369 | Staphylococcus argenteus sp. PH100533 | | |
| P00370 | Staphylococcus argenteus sp. PH100533 | | |
| P00312 | Staphylococcus aureus sp. PH100339 | | |
| P00313 | Staphylococcus aureus sp. PH100339 | | |
| P00314 | Staphylococcus aureus sp. PH100339 | | |
| P00315 | Staphylococcus aureus sp. PH100339 | | |
| P00316 | Staphylococcus aureus sp. PH100339 | | |
| P00317 | Staphylococcus aureus sp. PH100339 | | |
| P00318 | Staphylococcus aureus sp. PH100339 | | |
| P00319 | Staphylococcus aureus sp. PH100339 | | |
| P00320 | Staphylococcus aureus sp. PH100339 | | |
| P00321 | Staphylococcus aureus sp. PH100339 | | |
| P00312 | Staphylococcus aureus sp. PH100342 | | |
| P00313 | Staphylococcus aureus sp. PH100342 | | |
| P00314 | Staphylococcus aureus sp. PH100342 | | |
| P00315 | Staphylococcus aureus sp. PH100342 | | |

[0065] In some embodiments, phage isolates used in formulating phage-functional activated polymer fabric (e.g., nonwoven fabric) surface have a nucleic acid sequence of at least 30%, 40%, 50%, 60%, 70%, 80%, 90%, 95%, or 100% similarity with any one of the sequences listed in Table 2 or any one of SEQ ID NOs.: 1-132.

TABLE 2
Informal Sequence Listing

| Phage | Contigs |
|---|---|
| P00001 | SEQ ID NO.: 1; >353 len: 12656 cycle: O |
| | CATCGGCGCCCACAAAGACTCCTTTACTTTCGCCTACGGTGCCACCACCAAGCAACCCGGAGCATCCAAGGCACAATTGAAA |
| | GTCTTCTGCCAAGTCTCTGGCACCGAAGACAAGCCGCAGGTAGAGGACATGTCCATCAACCCTTCACGCTAACCCGAAAGAC |
| | AACACACCCATTATGCCTCTCATGTCCACCTACATGGCTAATGCGGGCCTGTCCGACATCATGCACATCCTCCATACCGCCGG |
| | GGGAGCCTGCCGGACAGGCACCGACATCGCCGCACGAATCAACACACTCCACCCAGAATACAATCTCCAAGCCACCACCGA |
| | CCAGCTCATCGACATCGAAAACCGCATCGACACTATTCGCAAAAACATTCAAAAAGAAATCAAGAAACACCCGTGAACATC |
| | ACCGACCACACCACCCCAGACCTGCACTCCTACGAAACGTTCTTCACCAGCCTCGCATGGATCCAAGGCGGCATCATCACAT |
| | GGATGTACGCAACCGGCACCCCACACAAGGCAGCCCTCGCCATTATTGCCGCATGCGCCCTCGCCACCCTCCTGGGTGCATC |
| | AACACTCACATACAAGCCCAAAGACAGCAAATGATCACAACACCCATACTGATCGCTGAAACCCTCGCCATAATTATTCTCG |
| | CAGTAGCACTCGCCCACAACAACAACCAGTAACCCACCCTTAAGGAGCACACATCTCATGGATGAGCCCACCCGCATGTACA |
| | CCGACCCCAACACCGGTGCCCGAAAAGAATTGAAACTCTGCAGGCTCTCCCTCATCGACCCCGCATCCCTTCACGCTCTCGGC |
| | GAAGTAGCAGGCTACGGTGCCACCAAATACGGCGACAACAACTGGACCGGAGGATACCCGTGGAGCCACAGTGTCGACGCC |
| | CTCTACCGCCACCTACTATCATGGCAGCAAGGCAACAACCTCGACCGCGAATCCGGGCTACCCCATTTGGCACACGCCGCCT |
| | GGCACTGCCTCGCACTCCTCGCATACCAGCAACACAATGCCGGGGTAGACACCCGCAACCCATGGAACACCCACAAAGGCG |
| | ACCAGTAATGCCTCTAGCACAATACCCGAAAACCATCCACCATCCAGGCCACATCTCCTACTCATCACTGTCACAGTGGGCCG |
| | AATGCGGAGAAAAATGGCGCCTATCCCACGGCTACCACACCCAACACCACACCTGGTACGCCACCATCGCCGGAAGCGCCAT |
| | ACACCACATCACCGAACAATACGACCTACACCTGTACAATCCCGCCGAATACCCTGCACTGCCAGACAAACTCTCATCCTTCA |
| | AAAATGTTTTCGACACCCAAGTCGCCCTCGCCGAATCCGAAGGCACAGAAATCAAACCCTCCGGCAGAATATGCAAAAACAT |
| | GTGCGAGTCGGGCGGGCCACACAAGAAGGACTACGACTGGTGGATGGTTTACGGCCCCACCTTTGTGGACCGCTGGAAAACA |
| | TGGAGGCGCAACCACCCAGAATACATCACCGCAATCCTGGGCGGTAAACCAGGCATCGAATACCCGGTAGAAACCATCCTCG |
| | ACGATGACACAAAAATAGTCGGATACATCGACCGGGTATTCACAGATACAAATACGGGTGAAACCTTCATTTTGGACCTCAA |
| | AACCGGCCGTCTACCCGCCGACAGTATGCAGCTGCACACATACCGGTACATGCTCAACCAACACGGCAACGATGTGACAAAA |
| | GGCATGTTTTGGACACCCGCCACCACTAAGGACGATAAGCTATCCTCTGAGCATGGCACCGCTACAGACTTGATTGATCTTGA |
| | CAACAACACCTACCGGCATGTATCATCCATGTACAGTCAAGCAATGAAAGGAATCAGCGAAGGCATCTTCGTCCCACACGTC |
| | ACAACACTCTGTAAAGGATGCCCCGTACGAGACGCCTGCTGGGCCGTCAATGGCAAAAACTCGTACAGATACCCGGTAGAAT |
| | CCACCGTACAGCCACCCCAAACAGACAATAAAGAAAAGGACACCTAATGACCGATAAAGACAAGATCGACAATGATCGACT |
| | CACGATCACACTCAAATACGGTGGCGACTATGCTGCCCCATGGACCGTCATTAGGGGAGACACAGCAGAGCAGACAAAACA |
| | GGCCATCATCGACCTGCTAGGAGGATTGAAAGACGAAACCGTATCGAAAGACTGGGACCTTGCAACACTCGTAGCGAGCGC |
| | ATCCATCATCCTCCAAGACCGATACAATCAGGCCACCAAAGACTACGTAAACAAAATCGCCAATCAGGAAAACGACATCATA |
| | ATTGACCGGATCAACAAAGCCACCAGCAAGGCAGAGCTCGCCGACCTTCTGAAACAGTACAAGAAGATCATCACCAGTAAC |
| | AGGGACGTGTCTGAGGCTTTCCGCAGCAAACGCAACAGCCTCACCCGATAAAAACCGACACAAACCAACAAAACCAAACAT |
| | AAACAGTAAAAGGAAAACAGTTATGGGACTCGCAAACTACCGCAACAACAGCAACAGCACCTTCTTCAACCCCTCCCGAAA |
| | CCAGGACGCCACCGCCATCGCCTTCAAAGTCCACGATGTAGAACACAACACTGAAGGCTACGGTGGACAAACAGCAGACCG |
| | CATCTACGCTGATGTCACAATCTTCCACACCCTAGGCGATCTCAACAACGGCACCCCAGAAACCATCCCCAACGCTATTATTG |
| | AGAAAGCGCGCGGCAACAACGACCGCCCACACTCCATGATCCGCGATCTAGAAGCCTATCTTGGCGAGGAGCAGGCCTTCAA |
| | ACTCGCCACCGTACGCACCAAAAACGGCTTCAACGCGGTAATCCTCAAACCCCTTGATGACGCCATCTACGATAAGGTTGCC |
| | GCATACGTAGACAAGCGTGATAACGGCCAGCTAGACGACACCACAGCCTCAACTGATGCTGATATCGACATCGACTCCATCT |
| | GACCACCAAAACACAACCAACCAATAGATAGATAAGGTCCCGATGCTCTCTCTCCAACGATCCTTCGAGAGAGCCTCCCAAA |
| | CCGCAGCCGAGCTGCCCCGCATACCCCAGCTAGAACCCCTCTACCGCAACCAGGACATGCACATCCACAAAGGGGATCTCAC |
| | CATGATTGCGGGGCGCTCCGGCAGCCAAAAATCCGGGCTAGCCATGTTCATCACAGCGATGCTCAACCAGCCCGCCCTCTAC |
| | ATATCAGGGGACATGACACCCTGGGAGGCCTCCACACGAATCATCTCACTCAACACCCAACACACCACCACACAGATACAAC |
| | AAAACATCGACGACTACGGGCCAGAATACTATCGAGACAGCATCCACCACGGCCAACACATCACATTCTCATTCCAGTCACC |
| | CATCACATGGACCGACATCACCACGGAATTGCAAGCCTACATGGAAATGTGGAACACCTTCCCACCCATCATTGTTATCGAC |
| | AACCTGATGGACATCCAAGACTGCGAGAGTGACTATCAGGCACAGCAAGAAGCCATGCAATGGATCACAGCATTAGGTAGG |
| | GATACTGGCTCCACCATCATCGTCACACACCATGCAACCGACAAAACCGGCTCCGACATCGAACACCCGCCAGCACGGCGAG |
| | AAATCAAAAACGGACTCTCAGAAAAACCACAACTCATCCTCGGAGTCTCATTGTATGGTGGCGAGGATAATGGCAACGGCCT |
| | CACGATACCGGCAGAGGCACGCATCGCCGTACTCAAACAGCGCACCGGCAAATCCGGTCCTGACGGAACCCGATACGAACG |
| | ACTCAAAGCCTACCCTGAATACACATTCTTCGGGCCCCTCGCCGAAAAACAGCCCTGGAACATGACCACAACACACAAAGGA |
| | CTCTAAAAAACTATGGCCACACAGCAGGCACGCAACCGGCGGGCCGGAGCCGAATGGGAAACACGACTCCTCCACCAGCTA |
| | CGCGACACCGGCCACGATATAGAACGCCTCCACCTCAACGGCCGCGAAGACGAAGGAGACCTCATCCTTCAAACCGGAAAC |
| | AAAACCTACGTTATCGAAGCGAAAGCCGGGCAGCCCCATCTCGCCGAATTCGTGAAACAAGCCAGCCGGGAGGCACGCAAC |
| | TACGAAACCCACCGAAACCGAGAAAGCCAGTCCACCATCGGACTCGTCGTCATGAAACAGCGCAACAAACCCTGGAGCGAA |
| | GCCTATGTGGTATCAACCCTCAACGAGCTCCTCCCACACCTCTGACACCTGCCGCCTCCTCGACACCTACCGGATACGGTACA |
| | ACCCATCCAAGAACGAGCAACACATCCTCTGCCCGTTCCACGACGACCACCAGCCCTCCATGAGCATCAACCTCGACAAGGG |
| | TGTCTGGTACTGCCACACATGCGGTGTCGGAGGCGGACTTGCCAAGCTACAACAACGATTAGAAGAAGAAAACCCGAATGTA |
| | CGACAGTATACGCCCATACAACATTGCGGAACGCCGCCGAATCCAGAAAGCCTCAGCCCGCTACGAAACCCACCTCGAAAAC |
| | ATACTCGACCTGCTCTCAGCAAGAGGCATCAGCGAAGAAACAGCCCGGCTCCACCACCTTGGATACATCGACAATGACCCCA |
| | TACCAGGCCACGAAGACTACAACCAGTGCATCACCATCCCCTACATGTACCCCGTCTGGGGCGGCCCAGCCGAAATACGAAA |
| | AATGCGTTTCCGCTGCTCACTCCAGCATGATTGCAAAACCCACAACCACCCCAAATATCTAACCCCGGCAGGGGACACAGGC |
| | TCCATCTACAACATGGCCGCCATGGCCAACCCGGCAGCCGAAATGCACATTTGCGAAGGCGAATCCGACTCCATGATCCTCG |
| | AACAATGCGGATGGTCGGCCGTAGCCCTACCCGGCGCAACCTCGTGGCAAAACTTTTGGACCAAATTCTTCGAAGGCTACGA |
| | CCACATCTACATCTGGTCAGACCCAGACCCCGCAGGCGACAAGATGGCCCAAACCCTAACCCAAGCATTACCGCAAGCCACC |
| | CATGTGCCCCTCACCCTGGGGGATGTCACAGACACCTACCTGCAGGCCGGAAAAACAGGGTTGGCACAAGCACTAGACACTG |
| | TGCTACAGTAAAACACGTCAACAACACGAAACCAGGAAGGTAAACTAAAACATCATGGATCCCCTCGACACGTGCCCCATCC |
| | CCAACCGGCGCAACACCAGCCAAACAGTCAGGAGGCGTATCCGCCTCGCCATCTGTGCAGAAAAATGGGCTGATGGTGAAG |
| | ACCCCACCTACATCATGCACACCTGGGGCACCACCTATGATGGGATGCGATCCATGATCCGCGCCAACCCCGACATTAAACT |
| | ACCCGACGACATGGCCAGACGGTTACACAAAATCTGCCGGAAAGCATACCCCAAAAACCAGCCCAACAGGCACCGAAGCGG |
| | ATGGGACGCCTACGAGAAAAACTACTACACCCACGAAATCCTCTTCCTCGACCAGTTCAACATCCCAGCCCTCGAAATCCTC |
| | AACCGGCTCGACGTGTCATGGGCCATGTGGAAACAAATCATCACCGAAAACCATCTCACACGGCTACAAGACGAGACCTACA |
| | ATGCGTGCCACTGGCACTATCTGAAACAGCAACACCCAGACTGGACCGACCAGCAAATCACACAAGCCCAACACGCCGGGA |
| | ACAACACCTTCAGCCAGTTCATGCAAGACGAACAGCCGGCACTATCGTGAGCATCTCGTTCAAACCCACAAAACGCAACCTT |
| | CAAACCATCCGAGACATCCTCACCCAGGCCACCAACCTCAACCCAGATGATCTGCCAGATGACACCCTCAACAACATCATCC |
| | AATACTGTTGGAACACCTTCACCGACAACAACCGGTACGCCGTCGCGGCACAATACTGGCGAGGCCAAAACCCGCCCGACCA |
| | GCAACATCAGCGCATACTAGTCGGCTACTACAAAACCGTTAAACAAGCCATGAACGCGGCCAAACAATTCCACTGGAACACC |
| | CGGCTACAACAACAATGGAAAACATGGATACTCCCAGTCCACAACGGCACCGTATCAGAGCATTTCACCAACCAGAAAACA |
| | CTCTTCGACACACAAACCAGCAACCAGGGTGACGCCGCACTGCCGGAGCATCTACAAAACGTCCTGTGCGGCAAAACACTCA |
| | ACCACACAGACGGAACCGTATCGTGGTGCACACGCAAACCAGGACACGACGGCGACTGCCGCACAGGATGGCAGCCCACCA |
| | CACAACCCCTAGGACATCATGGCAGCCAAAACTGAAACCCTCATCCAACGCTACGGCAACAAAGCCGCAGACGTCCTCGCCG |
| | ACAAAACCATCCCCGCCACACAGCTAGCCCAAATGCTCACTGAAGCCGGATACCCCATCTCCGCCACCGTCATTAAAGACTA |
| | TCGCCGCAAACAAGCCAACACCACCCCACAAACAGAAGAGGAAAACCAGTGATAGACAACATTGACCGGCTACTCACACAG |
| | CTAGCCAACTACGACAACGCCATCGACACCATCGACGACAATCTAGCCAATGGTACTGTACGACGCACACGAATCTCCGAAT |
| | GGACACTCCCCAACGGAGAAACAGGCCGATCCATACAAAAAATAATCGACCACCAACCCGCAACAAACCCCTACCCTGTAG |
| | ACGAACTCGTCGATAAACTAGCCGAATGGACACCCCCAAAACCAGCCGACAACACCCACACCGACTACAGCACTGCGGCCTT |
| | CGTCATCGGGGCGGGAGACTTCCAAATCGGCAAAGGCATCCCCGGCGGAGAAACAGCACACTTCGCCGACGACTACCTACA |
| | CTCCCTCGCCTCAGCTAAACACTACTGGCAGCAAGCAGGCCAGCCGCAACGAGTCCACATAGCCTTCCTCGGCGACATGATC |
| | GAAGGATACGTGTCACAAGGAGGCAACAACGCCTGGCGCACACAAACCCCCTTGACGGAACAAATCCGGCTCACCCGCATG |
| | GCCATGATGCAACTCGTCCACATGTTCGACCACTGCCAAAACGTGACAGTCACATCCATCCCCGGCAACCACGGAGAAGCCG |
| | TACGCTTCGGCAAAGGCGTCACCACCTACGACGACTCCTTCGACGTAGACTGCTGCCGCGCCATCGCAGAAGCCTACCAACT |
| | CACCAACAACTACCCCAACCTCCACTTTTATTTTCCTGACAGGGACGAAATGACCACCACCGTTGATGTGGCCGGAACACGG |
| | ATACTGCACGCCCACGGACACCAATGGCGCAACAACCAACACTACGAATGGTGGCGCGGCCAAGAATTCCACAACGGCACC |
| | GTATCCCACATTCTCATGGCCGGACACAGGCACCACCTCGAAATATCCGAGCAAGGACAACGCACATTCATACAATGCCCAT |
| | CCATGGAAGGAGAATCCGTCTGGTACCGGCACAAGACAGGCACCACCGGCAACCCCGGACTCGTGTGCTACACTATCAACCA |
| | CAAAACACCAGACAACTACCAAATAGCCAGATAAAAGAGATGCCATGAGTAGACGACCAACCAAAGTCCAACAAGCAACCA |
| | CAGCCAACTGGGAATGGGCCACCCCCAACCACCAACACCAGCTACACAAAGCCTGCACCAACATTGCCCGCCACTACCCGGC |
| | CGTCAACCCCGACGACCTGTACCAAGACTCTCTACTATATATTGCGGTACGCAACCAATACCACCAACTCACAGGCAACCAG |
| | TGGACCCAAATGTGCTACCGTGTCGCCCAACGACTAGCAAACAAAACAGTCCACCACCTAGACCTACCCAAACCCGTCCAAG |
| | AAATCACAGCCATAGCCGACAACCAAACCAGCAACTAAGGAGAACCACAATGGTCACAACCATCCTCGACGACGGCACCCA |
| | AACCACCAGGCTACAAACAGTAGGCGCCACCACCACCGCCATCATCACCAACACAGAAACACCCGAAACCATCACCGCCAA |
| | ATACACCATCAGTAAAGACGGCACAGCCACCTACAGCATCAGCGGAAACACCTATTTGGGAGACCACCAACACATCATCAA |
| | ACTCATGTACGACTACCGCCACTGCGTCGGACGCTTCGACACCACCAACCCAGACAACCCAGACAACCTCGACAACATGTTA |
| | AGGGGATGACACATGAACCGAACCTACACCACCGCCGACATCATTCAAGCCGCCCAATGGATCTGGAACGGAGGCCCATGG |
| | AAACCCTCCGTGGAGCCAGGCATGCCACCCCCACCAACCGCGCCACAGCATCACGGCAACAACATTGTCACCATGATCGATC |
| | TACAGCTAGCCATCGACGACTACACACTCGCCTGCCAGCCATCCAAACAGCGAAAACATTTGGCACGGCTGGCAGCATTCCG |
| | TGAAGTATACGGATACGATCAAACCTATTCGGTGGCAGCCCAGCGACTTGGGGTGACCAGGCAAACCGTGAAACAGTGGGC |
| | AGACCAAACACTCATCACCCTAACAGGCTACGCAAACAGCAGATACTATCCAGACGATAACGACGACAGCACAGGGATGGG |
| | ATAAAAACATGAACAACACACACAATATCCCCTACACTGCCCTCAAAACAGCGGTACACCGTATCATCCAACAACAGCCCAC |
| | CAACATGCAACAGTTGGAAAACATTGTTGGCGGTGTCGAAAACCAGTACCGTGTACCAATCTCACTCGACAACGTGAACCTT |
| | ACCGTCAACGAAGTCAGCCTCGACGATCTTGCTATCGACCAGGACACGCTAGACGAATGCAGTGAAATCCTATGGGACTGCG |
| | ACAGTGCAGGACACCCCACAAACAACAGCAACACCCGTGACAACAGCGAGGACCAGAGCCCCTATGCAAGCCAGGAAGCAC |
| | TAGACTGGCTCGCCGGAATCGCATACCAGGCAAAACTACTGCAAGCGGAGGCCGACGATATCATGCAGTCCATCCTCTACCA |
| | CCGCGACAACCACGAAGGCGTTATCGGCCAGGATGTTCTAGACCAGGCCAACGATACTATCTCAGCCTGCCTCCACCTGGAC |
| | CAGCTCATCGAAGACACACTAGACAACAACCTGTAAAACCCCTATAGACACAAAAAGAGTGCCCCAGCAGCAGCCACCACC |
| | CAACCGTGGCAGCACCGCTGGGGCACACATCTATATTCACTTATGCAACAGTAGACTCTACCGTGCCAACCTCAGACTCGGCT |
| | GCACGCCGAGGCACATAGCCGGCAAAACCATCCACATCATCTGCAGGCTCAATCATGCCAGGATCCGACACATCCACCGAGT |
| | GCGGCTCAACCAAGCCCCCATCGTCGGGGGGAACAAGCCCAGCATCCACAACCGTGGTTTTAGGTTTGCCGGCCACAAACGA |
| | CGGGCTACCAAACGATGTAGCAACCGACAACACCGCAGCCACCGTTGCTGTTATCAGGGCAGACTCCCACGGCAAACCGCGA |
| | AACGACTCCGCAGTATACGTGACACCCGCCGTCACACCCAACACTGCAACAAACGTTTGCACAAAAGTCTTAGCCGCCCGCT |
| | CCAGTAAACCTAACCAAAACTGTTTACCCACAACAAACCACCATCACTTTTTCAAACCGTTGACAGTCGACTCAAGCCTGTCA |
| | ATACGGCTACGACACGCCAGCACGTAATACCAGACACTCCACAAAGCATCCTTAGTGCGCCACAGCTTCCCCGTCACAGGAT |
| | TCTTCACCCACGACAAAGCCTCGACACGCTTACGCAAGTCACCATTCTGCACCTGAACCACACCAACATCGTGATGCAGCTTA |
| | TTCACCGAACCAGTAAGCTGAGCAGACAATTGTTTAATCTGATCACGCAAGGCTTTCACATCAGCCACCGTTAACTCCTCACT |
| | CTCTCCACTGCCGCCGTTCACGACGGCCATAAACCTGTCCCACGGAAACCACGGCCCCGGATCGTCATGATCCGACTGATGCC |
| | ACGCATCCGTCACATCAGTGTGCCCGCAGATGCCCCGCCTGCCAGCCTTCAAATCAGCCACAGACAGTTTCCTCTTCGGAACA |
| | CCATGCTTGTCACACAACTGCCGGCACAGCACCGCCGCTCTTTCCACCGCGGGCCACACCCGAGGATCCAGCCACTGCTCAC |
| | GAGTGTAAGCATGCCCTGGCACCCGGAACGAGGCGTGCGAACCGCCATCTGCGCAAACCTCTATACCCAAACTATGCGGATT |
| | CGGCGGGGCATGCCACCCAATCGTAGACTCCGACAAGCACTGCACCGTCTCCCCAATATCGCAAACATAATGCGCCGAACCA |
| | CCAGACGATGGGGACACGAAATAGTTTGCCGTGGACACCGCCCGCCCTTTACGGGAGGCAGACGGAAACCCCACATCCGGG |
| | CACGTCGCATGAATCACAACCCTGTTCACCGGACTATTCGAGCCGGCCGAGTGATGTGCTGCAGGAATAAACCTCACCACAC |
| | ACCACCACCAAACACTACCATCACAGCCACTCCTTTCTATTTGTGGGATGATATAGTCACTATAGGCGACGGTTTCACACCCT |
| | GGCAGGCCACCGAGCCCGATATTGTAGAAGCCACACCGTCACTATATTTCACAACAAGGCGGCCCCCGGAACAGTACACAGA |
| | CGCAACAGAACGGCCATCCTTACCATCTTTACCATCGGATCCGTTCGCACCGGCGGGGCCGCGCTCACCCCGTTCACCCTGTG |
| | CACCTTGCGGGCCGGCAGGACCTGAAGGGCCCACATCACCGCGCTCACCGGCCGAACCATCCCGACCAGCAGTGCCATCAAC |
| | GCCGTTCACACCGTCAGCACCTGCACGGCCTGGAACACCATCACGGCCATCCGACCCATTCACACCAGGCAACCCGTCAGGA |
| | CCTTTCACACCATTCAAACCAGGAGAACCCTGCGGACCAACAGGGCCAACCAGCCCAGCCGAACCATTAACACCATCACGCC |
| | CATCAGCACCTGCAGGCCCTTGCGGGCCGCGCTCACCGGCAGGACCCGGCACACCCTGCACGCTACGCTCAACACGCACAGC |
| | ATCCACACACAAACCAGACTGGTGAAGACGCACCGACTCCCGCCCACCCGAAGCACACACCCGCTTCACACTGCTAGCCAAC |
| | CCTTTAGCCGCTGTACCATTAGACTGGGCCCTCGCCTGCTCCGAATCCCGCTCAGAGGATACAGCCCCGAAACGCAAAGCAC |
| | CCCCGGCAACCACCGCCAACAACACAAGCGACAAAAACAGCAACACCAGTGAAAACTTCTCAAAATTGCGGCGCTGCCGCT |
| | TCTCCTCCTCCAACTCCCTCATCATTCACCCCCCAACGTGTCCGACAGGAAACTAGGCAACTCAGGCAAAACAATCGGATCAA |
| | CCCTGTCAGGAAGCCGGGCGTTAAACTGGCGCACCTCGCGCCGCACACACCACGTATACTCTTCCATCGCATCTACCTGAGCC |
| | GACAGCCGCCGCAAACGCTTCCGAGATTTAGATGTGGCAGCCTGAACCGAACCCAAAACCGTGGCCAATGCGGTACAGATA |
| | GAGGCCACCAGTGCAGGAGTAAACCACGACACCACAGCCCCCCGACATCACACCATCCGCCACAACAACAGCCCGGTCACA |
| | CGCCGACAGCAATCCAGTTAGCTATCGCAGGCACACCAGAAGGCTTAGACCCGTCATTCGTAATAAAAGCCAAACTAAAATT |
| | ACTATTAGTAATATTGTAGGCTTTCACATCAATCTGTGTCGTACCCCCAGCCGCCGTAGCCATAGACGCCACCACAACCGGCG |
| | GAGCACCGAACGGCCGCTCAAACGGGATCGTGTAAGCATACACAGCAGACCCGCCAAACATGATCTGCTTAGTGCCCGTCTC |
| | AATCCTCGGAGACAGTAGCATCCACTCGCCCGAATGGTTAGCCCACACAGCCCCAGAAGGAACCATCACACGGTCACCCTCC |
| | ACAGGGGTCGGGTCACACGCAGCAGACTCCCCAAACGCCACACGGGCAGCTATAGCACGCCTGTCAAGCTGCTGCTGCAACC |
| | CGTTAGACGACACCACCAGGGTAGCCAACAGTTGCTGATGGAACACGCCAGGCTCGGCCCTCAACACGTCACGGGCACGCTC |
| | CGCACGGCCACCCTGAACAATCTCCAACTTGGCTGTGTTCTGCTCCCAATCCCGAGACAACACCACATAGTCGTATCGGGTCT |
| | CACCGGGGCCAGGCAGCTGCCCTGTCACCGTCTCAACACTACTAGAAGTGCACATCACCCCGTGAGCCCAAGCCTGCCCCGG |
| | AAAAACCTCACACAACACCGTGGCACCCTGAACAGTAGTACCCACACGAAAATCGTCCGGCCCCTTCACAGACGGCATATTA |
| | CCCATCAGACCAGACATTTGAGCCCAATCATACTCGGTCAACACACCATCAAACCCTTTACACACAATACCCACAACAAACC |
| | CCTAATCTTTTTAGAATTTTTGCAAATCCCGCACACCCGCAGCCAAACCAGCAACACGCCGTGCTAGCAACGCCGACGGATTA |
| | TCCTCATAATCCCCCGCCACAGGAGTCACCTTCGTCCAACCATCACCAGGCGATACACACTCCACATCAATCTGCCGCACAAT |
| | CTCCGCAATAGGGCCAGAACCCACATCAACATAGATCAAATCCCCAGGCATCAGCTTGCCCGGCCCAANACGCAACACATCC |
| | NACTCCGCCAACTCGNTCTTAAACCCCGANGAAGCCTGCAACTCCCC |
| | SEQ ID NO.: 2; >2765 len: 15103 cycle: O |
| | GGTTGGTGGTCGATGATTTTTTGTATGGATCGGCCTGTTTCTCCGTTGGGTAAGGTCCATTCGGAGATGCGTGTGCGGCGTAC |
| | GGTTCCGTTGGCGAGATCATCGCGGATGGTGTCTGCTTCGTTGTCGTGGTTGGCTAGCTGGGTGAGGAGCCGGTCTATGTTGT |
| | CTATCATCGGATATCCTCTTCTTTTTTCTGTGTGGTGTTGGCTTGTTTGCGGCGATAGTCTTTAATAACAGTGGCGGAGATAG |
| | GGTATCCTGCCTGGGTGAGCTGTTTTGCTAGCCATGAGGGGGGATGGTTTTGTCTGCGAGCACGTCGGCAGCCTTATTGCCGT |
| | AGCGTTGAATAAGGGTTTCAGTTTTGGTTGCCATGATGTCCTATCGGTTGTGTGGTGGGCTGCCACCCTGTGCGGCAGTCGCC |
| | GTCGTGTCCTGGTTTGCGTGTGCACCGTGTTGTGGTTCCGTCTGTGTGGTGGAGTGTTTTACCGCACATGACGTTTTGTAGAT |
| | CTCCGGCAGTGCGGCGTCACCCTGGTTGCTGGTTTGTGTGTCGAAGAGTGTTTTCTGGTTGGTGAAATGCTCTGACACGGTGC |
| | GCGTTGTGGACTGGGAGTATCCATGTTTTCCATTGTTGTTGTAGTCGGGTGTTCCAGTGGAATTGTTTGGCGGCGTTTTCTGC |
| | CTGTTTTATGGTTTTGTAGTAGCCGACGAGTATGCGCTGGTGTTGCTGGTCGGGCGGGTTTTGGCCTCGCCAGTATTGTGCCG |
| | CGACGGCGTACCGGTTGTTGTCGGTGAAGGTGTTCCAGCAGTATTGGATGATGTTGTTGATGGTGTCATCTGGCAGATCATCT |
| | GGGTTGAGGTTGGTGGCCTGGTTGAGGATGTCTCGGATGGTTTGAAGGTTGCGTTTTGTGGGTTTGAACGAGATGCTCACGAT |
| | AGTGCCGGCTGTTCGTCTTGCATGAACTGGTTGAAGGTGTTGTTCCCGGCGTGTTGGGCTTGTGTGATTTGCTGGTCGGTCCA |
| | GTCGGGGTGTTGCTGTTTCAGATAATACCAGTGGCACGCATCGTAGGTTTCGTTTTGTAGCCGTGTGAGATGGTTTTCTTCGA |
| | TGATTTGTTTCCACATGGTCCATGACACGTCGAGCCGGTTGAGGATTTCGAGGGCTGGGATGTTAAACTGGTCGAGGAAGAGG |
| | ATTTCGTGGGTGTAGTAGTTTTTCTCGTATTGGTCCCATCCGCTTCGGTGCCTGTTGGGCTGGTTTTTGGGGTAGGCTTCCCG |
| | GCAGATTTTGTGTAACCGTTTGGCCATGTCGTCGGGTAGTTTAATGTCGGGGTTGGCGCGGATCATGGATCGCATCCCATCAT |
| | AGGTGGTGCCCCAGGTGCGCATGATGTAGGTGGGGTCTTCGCCATCAGCCCATTTTTCTGCTCAGATGGCGAGGCGGATGCGC |
| | CTCCTGGCAGCTTGGCTGGTGTTGCGCCGGTTGGGGATTGGGCACGTGTCGAGGGGATCCATGATGTTTTAGTGTACCTTTCT |
| | GGTTTCGTGTTGTTGACGTGTTTTACTGTAGCACAGTGTCTAGTGCTTGTGTCAACCCTGTTTTTCCGGCCTGCAGGTAGGTG |
| | TCTGTGACATCCCCCAGGGTGAGGGGCACATGGGTGGCTTGCGGTAATGCTTGGGTTAGGGTTTGCGCCATCTGGTGGCCCGC |
| | CTTGTCTGGGTCGGACCAGATGTAGATGTGGTCATAGCCTTCAAAAAATTTGGTCCAAAAAGTTTGCCACGAGGTTGCGCCGG |
| | GTAGGGCAACGGCCGACCATCCGCATTGTTCGAGGATCATGGAGTCGAATTCGCCTTCGCAAATGTGCATTTCGGATGCCGGG |
| | TTGGCCATGGCGGCCATGTTGTAGATGGAGCCTGTGTCCCCTGCCGGTGTCAAATATTTGGGGTGGTTGTGGGTTTTGCAGTC |
| | GTGCGGGAGTGAGCAGCGGAAACGCATTTTTCGTATTTCGGCTGGGCCGCCCCAAACGGGGTACATGTATGGGATGGTGATGC |
| | ACTGGTTGTAGTTTTCGTGGCCGGGTATGGGGTCATTGTCGATGTATCCAAGGTGGTGGTAGCGGGCTGTTTCTTCGCTGATG |
| | CCTCTTGCTGAGAGCAGGTCGAGTATGTTTTCGAGGTGGGTTTCGTAGAGGGCCGAGGCTTTCTGGATTCGGTGGCGTTCCGC |
| | AATGTTGTAGGGGCGTATGCTGTCGTACATTCGGGTTTTCTTTCTCTAGTCGTTGCTGTAGCTTGTGGAGTCCGCCTCCGATA |
| | CCGCATGTGTGGCAGTACCAGACGCCCTTGTCGAGGTTGATGCTCATGGAGGGCTGGTGGTCGTCGTGGAGCGGGCAGAGGAT |
| | GTGTTGCTCGTTTTTGGACGGGTTGTAGCGTATCTGGTAGTGGTCGAGGAGGCGGCAGGTGTCAGAGGTGTGGGAGGAGCTCG |
| | TTGAGGGTTGATACCACATAGGCTTCGCTCCAGGGTTTGTTGCGCTGTTTCATGATGACGAGTCCGATGGTGGACTGGTTTTC |
| | GCGGTTTCGGTGGGTTTCGTAGTTGCGTGCCTCCCGGCTGGCTTGTTTCACGAATTGGGCTGGGTGTGGCTGGCCCGCTTTGG |
| | CTTCGATCACATAGGTTTTGTGGCCGGTTGTGAGGATGAGGTCGCCTTCGTCTTCGCGGCCGTTGAGGTGGAGGCGTTCTATA |
| | TCGTGGCCGGTGTCGCGTAGCTGGTGGAGGAGTCGTGTTTCCCATTCGGCTCCGGCCCGCCGGTTGCGTGCCTGCTGTGTGGC |
| | CATAGTTTTTTAGAGTCCTTTGTGTGTTGTGGTCATGTTCCAGGGCTGTTTTTCGGCGAGGGGCCCGAAGAATGTGTATTCAG |
| | GGTAGGCTCTGAGTCGTTCGTATCGGGTTCCGTCAGGACCGGATTTGCCGGTGCGCTGTTTCAACACTGCGATGCGGGCTTCG |
| | GCTGGGATCGTGAGCCCGTTGCCGTTGTCTTCGCCACCATACAATGAGACTCCGAGGATGAGTTGTGGTTTTTCGGAGAGGCC |
| | GTTTTTGATTTCGCGGCGTGCCGGGGGGTGTTCGATGTCGGTTCCTGTTTTGTCGGTTGCGTGGTGGGTGACGATGATGGTGG |
| | AGCCAGTATCTCTGCCCAATGCTGTGATCCATTGCATGGCTTCTTGCTGTGCCTGGTAGTCACTCTCGCAGTCTTGGATGTCC |
| | ATCAGGTTGTCGATGACAATGAGTGGTGGGAAGGTGTTCCACATTTCCATGTAGGCTTGTAATTCCATGGTGATGTCTGTCCA |
| | TGTGATGGGTGACTGGAATGAGAATGTGATGTGTTGGCCGTGGTGGATGCTGTCTCGATAGTATTCTGGCCCGTAGTCGTCGA |
| | TGTTTTGTTGTATCTGTGTGGTGGTGTGTTGGGTGTTGAGTGAGATGATTCGTGTGGAGGCCTCCCAGGGTGTCATGTCCCCT |
| | GATATGTAGAGGGCGGGCTGGTTGAGCATGGCGGTGATGAACATGGCTAGCCCTGATTTTTGGCTGCCGGAGCGCCCCGCAAT |
| | CATGACCAAATCCCCTTTGTGGATGTGCATGTCCTGGTTGCGGTAGAGGGGTTCTAGCTGGGGTATGCGGGGCAGCTCGGCGG |
| | CTGTTTGGGAGGCCCTCTCGAAGGATCTTTGGAGAGAGAGCATCGGGACCTTATCTATCTATCGGTTGGATGTGTATTGGTGG |
| | TCAGATGGAGTCGATATCGATATCAGCATCAGTTGAGGCTGTGGTGTCGTCTAGCTAGCCGTTATCGCGCTTGCCTACGTATTC |
| | GGCAACCTTATCGTAGATGGCGTCATCAAGGGGTTCGAGGATTACCGCGTTGAAGCCGTTTTTGGTGCGCACGGTGGCGAGTTT |
| | GAAAGCCTGCTCCTCGCCAAGGTATGCTTCTAGATCGCGGATCATGGAGTGTGGGCGGTCGTTGTTACCGCGTGCTTTCTCAA |
| | TAATAGCGTTGGGGATGGTTTCTGGGGTGCCGTTGTTGAGATCGTCTAGAGTGTGGAAGATTGTGACATCAGCGTAGATGCG |
| | GTCTGCGACCTGTCCGCCGTAGCCTTCAGTGTTGTGCTGCACGTCGCGGATTTTGAAGGCGATGGCGGTGCCGTCCTGCTTTC |
| | GGGAGGGGTTGAAGAAGGTGCTGTTGCTGTTGTTGCGGTAGTTTGCGAGTCCCATAACTGTTTTCCTTTTACTGTTTATGTTTG |
| | GTTTTGTTGGTTTGTGTCGGTTTTTATCGGGTGAGGCTGTTGCGTTTGCTGCGGAAAGCCTCAGACACGTCCCTGTTACTGGTG |
| | ATGATCTTCTTGTACTGTTTCAGAAGGTCGGCGAGCTGTGCCTTGCTGGTGGCTTTGTTGATCCGGTCGATGATGATGTCGCTT |
| | TCCTTGTTGGCGATCTTGTTGACGTAGTCTTTGGCGGCTTTATCGTATCGGTCTTGAAGCAGGATTGCTGCGCTAGCGATGAG |
| | GGTTGCGAGGTCCCAGTCTTTGGATACGGTTTCGTCTTTCAATCCTCCTAGCAGATCAATAATGGATTGTTTGATGTCTTCTGC |
| | GGTGTCTCCGCGGATGACGGCCCATGGGGCAGCATAGTCGCCACCGTATTTGGGAGTGATCGTGAGTCGATCATTGTCGATCT |
| | TGTCTTTATCGGTCATTTGGTGTCCTTTTCTTTATTGTCTGTTTGGGGTGGCTGTACGGTGGATTCTACCGGGTATCTGTACGA |
| | GTTTTTGCCATTGACGGCCCAGCAGGCGTCTCGTACGGGGCATCCTTTACAGAGTGTTGTGACGTGTGGGACGAAGATGCCTTC |
| | ACTGATTCCTTTCATTGCTTGACTGTACATGGATGATACATGCCGGTAGGTGTTGTTGTCAAGATTGTAGAGTTCGGTGGATG |
| | TGCCCTGTGCGGGGGATTTATCGTCGTTGCGGCTGGTGGCCGGTGTCCAAAACATGCCTTTTGTCACATGTATGTCGTGTTGTT |
| | CGAGCATGTACCGGTATGTGTGCAGCTGCATACTATCGGCTGGTAGGCGTCCTGTTTTGAGGTCGAGGATGAATGTTTCACCC |
| | GTATCTGTGTCAGTGAAAACGCGGTCAATATATCCGACTATTTTTGTGTCATCGTCGAGGATTGTTTCTACCGGGTATTCGATG |
| | CCTGGCTGGCCGTCTAGGACTGCGGTGATGTATTCTGGGTGGTTGCGCCTCCATGTTTTCCACCGGTCCACGAAGGTTTGGCC |
| | GTAAACCATCCACCAGTCGTAGTCTTTCTTGTGTGGCCCGCCCGACTCGCACATGTTCTTGCATATTCTGCCGGAGGGTTTGAT |
| | TTCTGTGCCTTCGGATTCGGCGAGGGCGACTTGGGTGTCGAAAATGTTTTTGAAGGATGAGAGTTTGTCTGGTAGTGCAGAGT |
| | ATTCGGTGGGGTTGTACAGGTGTAGGTCGTATTGTTCGGTGATGTGGTGTATGGCGCTTCCGGCGATGGTGGCGTACCAGGTG |
| | TGGGAGGTGGCTTTGTATCCGTGTTGGAGGCGCCATTTTTCTCCGCATTCGGCCCACTGGGTGAGTGAACTGTAGGAGATGTG |
| | GCCTGGGTGGTTGATGGTTTTCGGGTGTTGTGCTAGAGGCATGTTAGTTGTTTTTGTTCCATGGGTTGCGGGTGTCTTGGCCGG |
| | CCTGGTGTAGCTGGTAGGCAAGGAGTGCGAGGCAGTGCCAGGCAGCATGGGCTAGATGCGGTAGCCCGGATTCGCGGTCGA |
| | GGTTGTTGCCTTGCTGCCATGATAGTAGATGCCTGTAGAGGGCGTCAATGCTGTGGCTCCACGGATAGCCGCCGGTCCAGTTG |
| | TTGTCGCCGTATTTAGTAGCACCGTATCCGGCTACTTCGCCTAGGGCGTGCAAGGCTGCGGGGTCGATGAGTGAGAGCCTGC |
| | AGAGTTTTAATTCTTTTCGGGCTCCGGTGTTGGGGTCGGTGTACATGCGGGTGGGCTCATCCATGGGGTGTGTGCTCCTTAAG |
| | TGTGGGTTACTGGTTGTTGTTGTGGGCTAGTGCTACGGCGAGAATAATGATGGCGAGGGTTTCAGCGATGAGGATGGGTGTT |
| | GTGATCATTTGGTGTCTCGGGGATTGTTGGTGAGGGTTGAGGCACCCAGGAGAGTGGCGAGGGCACATGCGGCGATGATGGC |
| | GAGGGCTGCCTTGTGTGTGGTGCCGGTCGCGTACATCCATGTGATGATGCCGCCTTGGATCCAGGCTAGGCTGGTGAAGAAC |
| | GTTTCGTAACTGTGTAGCTCAATGTTATTGTTGGGTGTGTTCATGCTTGCTCCTGAAGAATGGTGTTGATGGTTTTATAAATGT |
| | TGTACAGGTCGGTTTCGATAGATAACAGTTGGTTGATTTGGTGGTCGAGATCAATGTCTGGGTTGAGGGTGTTGATGCGGGAG |
| | GCGATGTCGGTGGCTGTGCGTAGTGTGCCGCCGGTGTGGTGAATGATGTGTGCCGTGTCGGCGAGTCCGGTGGTGACAGCGT |
| | AGTGGGAGAGGAGAGGCATAGCTGGGGGGTGCTCCTTGGCGGGTTACTGTTGCGGGTTGATGTTGAGGTCGGTGACGTGCGG |
| | GTGGTCTTCTGTTCCGGTGACGAGGCAGTGGACTGTGACGGGTAGTTTGGATGCTCCCGGCTGTTTCGCGGTTGCGCCGTAGA |
| | CGATGGAGAAGGTGTCTTTACCAATAATTTTGTGGAGTTGTAGGTCGATGTCGGGGTTGCCGTTCCATTTGACACCGTTTTCT |
| | GCGGCTGCCTGGGTGGCTTTCTGGTTGCAGGCGTGTGCGGCGGTGATCATGGTTAGCCCCTTGCTGGTTTCTTCACCCCTTGCT |
| | TGGGCTTGCCGGTGGGCGCGCTCCTGTTCTGCTTGTAGGGAGCGGACTGCTGCGGCCTGGCGGGCTTTCTTCTCAGTCTTGCG |
| | CTGCTGGACGGTTTTGGGTGTCCATTCGGCGTTTGCTGTGGTGGCTTGTGGGGGGGGCTGTGAGGCGAGTGGCGGGTTGTCGT |
| | CTGGGGCTGGCAGGAAGGAGGCTGCGGCGATGATGGCGGCTGTGATGCCTGCGATGGTGTAGCCTTTTTTCTTGTTCATGACT |
| | GTTGTCCCCTTTCCGGGGTGTTGTTCGTTGCTGACATGATTAATTATGGTGTGGGCGGTGGCCCATGTCAAGGCTGCGCTCAA |
| | CGATTATGAGCGATCCTTGTATGGCTAGGGGTTATATCGGGCGCACAGGGTGAGTAGGTGGCCAACATTGATGCGGCTCACA |
| | TTCCAGTAGAGTTGCGTGGCTTCCCCACCGGTGAGTGGCTTCCACTCGTCATGGCTGTAGACGGTGCCGTCGGTGGCGATGAA |
| | CGTGTTGGGGCGCAGCTTGTGAAGTTCAGTCTCTACATGCTGCCGGTAGGCTTCGGCGAGGCCCTCGAAATCGAGGTGGTCG |
| | CAGGAGAGGTTTTCGAGGCGTGTCAAGTCGAAAGGCTCAGGGCAGTCCAGGGCGGGGGTGTAGAGCTGGGTGAAGTGGTCG |
| | GCGATCTTCTGCATGACGGGTTCCTTTCTGGTGTGTGGATGGTTTTTATCGTGTGGTTTCTTGGAGGTTTGTGGTGGTGTCGAT |
| | GGTGTCGATCTCCCAGGCGAGTTCCTCGGCCTCATCCGCGGTGAGTGGCTGCCAGTTGCGTGGCCCATACACTGCACCGTCGA |
| | GAGTGATGGTCCAGTCGGGGCGGAAGAGGTTTAAGGCTTCTTGCACAGCATCCCGATAGACATGTTTGGCGGCGTCCAGGTT |
| | GATGTGGTTGGCGTGTCGGCCGGCTAGCTGGGTGAGGTCGAGGGGGTCGATTTCTGTCTGCCCGTAGAGGGAGGTGATGGAT |
| | GGGGTGATGAGTGTGGTGGCCATTTTTGGTGTGTTCCTTTCGGTGGTGTATGGGTTGTTGTGGTTTCTAGAGTGTGTAGGTTGC |
| | AACCGGGAGTCAAGGCTGCGCTCAACCGGATTGAGCGTTTCATGCTGGAGTGTCGGGTGTGACAGATGCCACTTAAGCCTTT |
| | ATGGCATCTCTCAGCGTCTCAAATCTTCTGGGGGTAGGATGATGCAGGGTTAGTCCTGCTGATCGATTCTAGGCCCCATACAG |
| | GGCGTCTCAGTGGTATGTCTGGGTGATAGCGGGTGTGGCAGATGATCTAGCGGGTCAAGGTGCCGGGCTTAGACATAAGATC |
| | TATCATCTAGATGTGTGAGATGTATCACACTCTCCTGGCTTGGTGTGCCCCCTCAAGGCCACCCAGCCGATCTGGCGTGAAGG |
| | GTGTAGCCCAGAAATACCGTTTAAAGCTGTGACACGGCGCCTAGGAGCGCCTTACAGGGTGGGGGCTAGGTATTTATACCCC |
| | CAAGCAATTCTGATCGATTCTAGACGTCCCCCAGAGCCTGATACACGATCAACCATCCCGGCATAGATCATCAGCCCCTATCC |
| | TGGTTAGCTCAGCCTCAACTATGTGGACAGTGTGGGATACTGTGGGGGGAGAAGGACGCGGTAAAAGAAAGAGGGGGGCAT |
| | CAGCCTTAGGGTCTTAGCACTGATGGACTTAGCACCGAGCCCCTCAGGGGCTCGACATCAGCCCGAGCAGGCTCAGCTCATC |
| | AGGCACAGCCCTGAAAGAGGTACATGCCATCAGGGAAGGCTTGAGAGTACGAGGAGCCTTAGCGACGAGTACTCGAAAGCC |
| | TGAGGGAACACCCTCAGCACTGATGGGCCTAGCGTGTTCGGAAAAGACACGGGTCAAGGTGTGACAGCTGTCCGGGAGTGA |
| | AACCCGTTCTGACTAGGGGTTTCAGCCTTAACCACCTGTAAAGGTTACAAGACTCTAAGAAAATTTAAGGAAAAGTTTAGGT |
| | TTAATTTTTGGACCTTTACTACCAAAAACACCCGTTTCCACCCCTCAAACCCGCCTATAGAGCCAAATCCACCAGTTTGACTC |
| | ATCCGAGGTGGGGTGGGATAGGCTGGACAGGTAGCCAGCTGGACGCAAGGCCGGAAAGTGCTAACGCACTTCCCAACCTCG |
| | CTTAGCATCAGTCTACCAAACACTTAAAGACCTAAGGGCTTAGCGCTAAGGTGCTGATAGCTTAGCACCGAGCCCCTCAAGG |
| | GCTCGGCATCAGTCTTAGGTACTTAAGGATCTAAGTTACTATAAAAGCTTTAAAGTCTTAAAGTAACTATAAAACCTTAAAGG |
| | CTAAGCACTTAAGGATATAAAATTAACATCAGTGTGTAAGACTTAAAGAGTTAAAATAACCATAAAGCTTTAAACACTTAAA |
| | GTAACTATAAAACATTAAAGACCTTAAGTACTTAAAGTTAACCATCAGTCTTAAACTTTAATATTATAACCTATAAGTCTTAA |
| | AGCTTATAGGTATAATAATATAATATAACTATATAAGTATTAAAGCTTATAANTTATAAAAGTTTTAGNAGAGCTAAGGGGTT |
| | AACTTCTTTACTTCTCTTCTCTCTTTGGTTCTTTCTCTCTTCTCTTCTTTTCTTCATCAGGGGAGAAGAGGAACCTTTTACCAT |
| | CAGCGTCGATGGGCTTTTCACCGTGTGACTCGTGTACCACCGGTCGCACGCTCCCGGTGACACACTCCCCACACTCTGACACCC |
| | GTGTTCCTTTCAGGCTTAGCGTGCTTAGCTGAAGGCGTACGGCGTGTCACGCCAACATCCTTAACACTAGGTAAGACTTAAAGT |
| | GTATATTATATGTAGAAGACTTTAAAAACTTTGAAGGTGTTCCCGCTTAGCCTGTGTTCTACACCGCTAGGCGCTAAGCGCTA |
| | AGTCTTGAAACGCGAACACACACCCACCCCCTTTTTCTTTCGTGTCCTTCTTCTTTTGACACCGCTGGGGGGCGATGTGATCTT |
| | TCTCACATGCCAGGGGGTAGTGGAGAAAACAACCACCCCACCACACACAGAACACCCCCTCAAACAAACAAAACGCCCCCC |
| | CAGAATCGAACAGCAGGGCAAGGGCAAGGTATTCATACCCCCAACAGTTCCCAGGCCGTTAGAGAGGCAAATAAGACCCAT |
| | ACAGGGCTAGGCGAGGAACAGACACATCATGGCACGCACCAACCGCACAGCATCCTCCGCCCACCGGCGCTGGCGGGCAAG |
| | ACTCATCACCCAAGCCCGACAACAAGGCCAAACCGAATGCCCACTCTGCGGAGCAACCATCACCTGGGACACACACCAGCTA |
| | CCAACAAGCCCCGAAGCCGACCACATCACACCCGTCAGCCGGGGAGGACTCAACACCCTCGACAACGGGCAAATCATCTGC |
| | AGAACATGCAACAGAAGCAAAGGCAATCGCAGTGAACCAAACATTAGTTTCCAACAACAAACCACAAAAACGTTGATTCCA |
| | TGGTGAAAAACCCGCCAACCCCCACCGGGGACACCCCCTGCACACCCGTGCAAAACCTCGTACGGCTTAGTGAAATACCTCC |
| | CTTTTGTGGTTTTGTCTGTTTGTCGACTTTTTGTGTTGGTGGTGAGTGTTGTGCAGCCTGAGCTTCCTGATAGTCGTGAGTGGT |
| | GTGGGGAGACGCGTCGTTGGTGGCGTGTGTGGGGTGAGGATAGTCGCGCGCAGTATGTGTCTGATGAGGAGTGGCTGTTTCT |
| | CATGGATGCTGCGGTGATTCATGATGTGGTGTGGCGTGAGGGTCGCGCTGATTTGGTGGCTTCGCTTCGTGCTCATGTGAAGG |
| | CGTTTATGGGCATGTTGGATCGTTATTCGGTTGATGTGGTGTCTGGTGGCCGTGGTGGGGGTTCTGCGGTGGCGATGATTGAC |
| | CGGTATCGGAAGCGTAAAGGGGCCTAATGTCGAGCGTTGTTGGTTCTCAGGTTCCTCGTCATCGTGTGGCTGCAGCGTATTCG |
| | GTGTCTGCGGGCGGGGATGCTGGGGAGCTTGGTAGGGAGTATGGGCTGACGCCTGATCCGTGGCAGCAGCAGGTGTTGGATG |
| | ATTGGCTTGCGGTGGGTGCAGGGGGTCGTCTTGCTTCGGGTGTGTGTGGGGTGTTTGTGCCTCGCCAGAATGGCAAGAATGCT |
| | ATTTTGGAGATTGTGGAGTTGTTTAAGGCGACTATTCAGGGTCGCAGGATTTTGCATACTGCTCACGAGTTGAAGTCGGCTCG |
| | TAAGGCGTTTATGCGGTTGAGGTCGTTTTTTGAGAATGAGCGGCAGTTTCCTGACTTGTATCGTGTGGTGAAGTCGATTCGTG |
| | CGACGAATGGTCAGGAGGCTATTGTGTTGCATCACCCGGATTGTGCCACGTTTGAGCGTAAGTGTGGTTGTCCGGGTTGGGGT |
| | TCGGTGGAGTTTGTGGCCCGCAGTCGGGGTTCTGCTCGCGGGTTTACGGTTGATGATTTGGTGTGTGATGAGGCTCAGGAGCT |
| | GAGCGATGAGCAGTTGGAGGCTTTGCTTCCTACGGTAAGTGCTGCCCCGTCGGGTGATCCGCAGCAGATTTTTCTTGGTACCC |
| | CGCCGGGGCCGTTGGCGGACGGTAGCGTGGTGTTGCGTCTTCGCGGGCAGGCTTTGTCGGGTGGTAAAAGGATTGCGTGGAC |
| | GGAGTTTTCGATTCCTGACGAGTCTAACCCGGACGATTTAGCTCGACAATGGCGGAAATTGGCTGGGAATACTAATCCAGCC |
| | TTGGGTCGCCGCCTGAATTTTGGGACAGTCTCGGATGAGCATGAGTCGATGTCTGCTGCCGGGTTTGCTCGGGAGCGGCTTGG |
| | CTGGTGGGATCGTGGCCAGTCTGCTTCGTCAGTGATTCCGGCGGATAAGTGGGTCCAGTCGGCTGTGGATGAGGCTAGTCTG |
| | GTTGGCGGGAAAGTGTTTGGTGTCTCGTTTTCTCGTTCTGGGGATCGGGTTGCTTTGGCGGGTGCTGGCCGGACTGATGCTGG |
| | GGTTCATGTTGAGGTTATTGATGGGCTGTCGGGAACGATTGTTGATGGTGTGGGCCGGTTGGCTGACTGGTTGGCGGTTCGTT |
| | GGGGTGACACGGAGCGGATCATGGTTGCCGGGTCTGGTGCGGTGTTGTTGCAGAAGGCGTTGACGGATCGTGGCATTCCGGG |
| | CCGTGGCGTGGTGGTTGCTGATACTGGGGTGTATGTGGAGGCGTGTCAGGCGTTTTTGGAGGGTGTCAGGTCGGGTGTGATC |
| | AGTCATCCTCGTGCTGATTCTCGCCGTGACATGTTGGATATTGCTGTGAGGTCGGCTGTGCAGAAGAAGAAAGGCTCTGCGTG |
| | GGGTTGGGGTTCCTCGTTTAAGGACGGCAGTGAGGTTCCTTTGGAGGCTGTGTCGTTGGCGTTTTTGGGGGCTAAACGTGTTC |
| | GTCGTGGCCGTCGGGAGCGTAGTGGTAGGAAGCGGGTGTCTGTGGTATGAACGTGGATGAGTTGGCTCTGATTGAGGGCATG |
| | TTTGATCGTATCCAAGGGTTGTCTTCGTGGCATTGCCGCATTGAGGGCTACTATGAGGGCTCTAGCCGGGTGCGTGATTTGGG |
| | GGTGGCTATTCCTCCGGAGTTGCAGCGTGTGCAGACGGTGGTGTCGTGGCCTGGTATAGCTGTGGATGCTTTGGAGGAGCGTC |
| | TGGATTGGCTTGGCTGGACTAACGGTGACGGCTACGGCCTGGATGGTGTGTATGCGGCGAATCGGCTTGCTACGGCGTCGTG |
| | TGATGTGCATTTGGATGCGCTGATTTTTGGGTTGTCGTTTGTGGCTGTTATTCCCCAAGGCGATGGGTCGGTGTTGGTTCGTCC |
| | GCAGTCACCCAAGAACTGTACAGGCCGGTTTTCGGCTGACGGGTCTCGTCTGGATGCTGGCCTTGTGGAGCAGCAGACGTGT |
| | GATCCTGAGGTTGTTGAGGCTGAGTTGTTGTTGCCTGATGTGATTGTTCAGGTGGAGCGGCGTGGGTCTCGTGAGTGGGTTGA |
| | GACGGGCCGTATTGTGAATGTTTTGGGTGCGGTTCCGTTGGTGCCTGTTGTGAATCGTCGCCGTACGTCGAGGATTGATGGCC |
| | GTTCGGAGATTACGAGGTCTATTAGGGCTTACACGGATGAGGCTGTTCGCACACTGTTGGGGCAGTCTGTGAATCGTGACTTC |
| | TATGCGTATCCTCAGCGTTGGGTGACTGGCGTGAGCGCGGATGAGTTTTCGCAGCCTGGCTGGGTCCTGTCGATGGCTTCTGT |
| | GTGGGCTGTGGATAAGGATGATGACGGTGACACCCCGAATGTGGGGTCGTTTCCTGTGAATTCTCCTACACCGTATTCGGATC |
| | AGATGCGGCTGTTGGCGCAGTTGACTGCGGGTGAGGCTGCGGTTCCTGAACGCTATTTCGGGTTTATCACGTCTAACCCGCCT |
| | AGTGGGGAGGCTTTGGCTGCTGAGGAGTCACGGCTTGTGAAGCGTGCTGAGCGGCGTCAGACGTCGTTTGGTCAGGGCTGGC |
| | TGTCGGTTGGTTTCCTGGCTGCCAAGTCGCTTGATTCTTCAGTTAACGAAGCTGATTTTTTTGGTGATGTTGGTTTGCGGTGGC |
| | GTGATGCATCAACACCTACTCGGGCGGCTACAGCGGATGCTGTGACGAAGCTTGTGGGTGCCGGTATTCTTCCGGCGGATTCT |
| | CGGACGGTGTTGGAGATGTTGGGTTTGGATGATGTGCAGGTTGAGGCTGTGATGCGGCATCGTGCCGAGTCTTCGGATCCGTT |
| | GGCGGCACTGGCTGGGGCGATATCGCGGCAAACTAACGAGGTTTGATAGGTGATGGCTTCGGGTGTTGCGTCGCGGATGGCT |
| | GCTGCCGGGTATCAGCGTGAGGCGGTCAGGTTTGCTGGGAAGTATGCGGGCTATTATGCCGAGCTTGGTCGTTTGTGGCATTC |
| | CGGGAAGATGACAGATGCGCAGTATGTGCGTTTGTGTGTGGAGTTGGAGCGTGCCGGCCATGACGGTTCCGCGGCGCTGGCG |
| | GGCAAATTCGTGTCCGATTTTCGGAAGCTTAACGGTGTCGATCCTGGTTTGATTGTGTATGACGAGTTTGATGCTGCCGCCGC |
| | GTTGGCTAGGTCGTTTTCGACTATGAAGATGATGAATAGTGACCCGGATAGGGTGAATGATACGATTGATGTGATGGCTGCG |
| | GGTGTTGATCGGGCTGTTATGAATGCTGGCCGTGACACGGTTGAGTGGTCTGCTGGTGCGCAGGGTAGGTCGTGGCGCAGGG |
| | TGACGGATGGTGATCCGTGTGCTTTTTGTGCCATGTTGGCTACGAGGTCGGATTATACGACTAAGGAAAGGGCACTCACTACT |
| | GGCCATACGCGGCGTCATAGGCGTGGTGGTAAGCGCCCGTTTGGTTCGAAGTATCATGATCATTGTGGGTGTACGGTGGTTG |
| | AGGTTGTTGGGCGTTGGGAGCCCTCCTCTGCGGACACCGCATATCAGCGGGTTTATGAGAAGGCTCGTGAGTGGGTTGATGA |
| | TCATGGGTTGCAGCAGTCGCCTGGCAATATTTTGAAGGCTATGCGTACTGTTGGCGACATGAGATGATGGTTTCCGGTTGTGT |
| | GCCGCCGGTTATCGGTGCACAGGGTTGTCACCCGCACGGGGGTCAACAATGTTGTGTTGTTTTCCGCAAGGAGTGTAGGGTTA |
| | GGCTATGGCCGATCAGAGTGTTGAGGAACAGAATGTTGACAATGATGTTGTGGAGTCCGGAAAGGATAACGGCATTGTTGAT |
| | ACGATAAAAGACGATGGCGGGCAGGAGGTAGCCGACAATCAGTTGAAGAATGAAGGCGGTGATAAGCCGTCTGGGACTGAT |
| | TGGAAGGCGGAGGCTCGCAAATGGGAGTCTCGTGCTAAAAGTAATTTTGCTGAGCTAGAGAAGCTTCGCTCCACCGACGATA |
| | ATTCGGAGTCTACTATTGATGGTCTTCGTCGTAAAAACGAGGAACTTGAGAGTAGGCTGAATGAGCTGGTTTTGGAGGGTGT |
| | GAAGCGTGAGGTGGCCACCGAGCATGGCCTCTCGGCTGATGCTGTAGCTTTCTTGTCTGGTGGTGATCGTGAGTCGCTTGCCG |
| | AGTCTGCTAAAGCTCTTAAGGGGCTGATTGACCATAGTGGTAGTGGTGGCGCGGGTGTGCGCCGTCTTGCGGGGAGTGCCCC |
| | CGTGACTGATGAGAAGCATCGCGAGGGTGTCGCTTTCGTGGATGCTTTAGTAAACAATTCTAGGAGACGATTTATCATGGCTG |
| | ACGATTTTCTTTCTGCAGGGAAGCTTGAGCTTCCTGGTTCTATGATTGGTGCGGTGCGTGACCGTGCTATCGATTCTGGTGTGC |
| | TTGCTAAGCTGTCGCCGGAGCAGCCGACGATTTTCGGGCCTGTTAAGGGTGCCGTGTTTTCGGGTGTTCCTCGCGCCAAGATT |
| | GTTGGTGAGGGTGAGGTCTGTCTCTTATACACATCTC |
| | SEQ ID NO.: 3; >3432 len: 10869 cycle: O |
| | GTCGGGTGATCCGCAGCAGATTTTCCTTGGTACGCCGCCTGGGCCGTTGGCTGACGGTAGCGTGGTGTTGCGTCTTCGTGGGC |
| | AGGCTTTGTCGGGTGGTAAAAGGTTTGCGTGGACGGAGTTTTCGATTCCTGACGAGTCTGATCCGGATGATTTGGGGCGGCA |
| | GTGGCGGAAGTTGGCTGGTGACACTAATCCGGCGTTGGGTAGGCGTCTGAATTTTGGGACTGTGTCGGATGAGCATGAGTCG |
| | ATGTCTGCTGCCGGGTTTGCTCGGGAGCGGCTTGGCTGGTGGGATCGTGGCCAGTCTGCTTCGTCAGTGATTCCGGCGGATAA |
| | GTGGGTCCAGTCGGCTGTGGATGAGGCTAGTCTGGTTGGCGGGAAAGTGTTTGGTGTCTCGTTTTCTCGTTCTGGGGATCGGG |
| | TTGCTTTGGTGGGTGCCGGCCGGACTGATGCTGGGGTTCATGTTGAGGTTATTGATGGGCTGTCGGGAACGATTGTTGATGGT |
| | GTGGGCCAGCTGGCTGACTGGCTGGCGTTGCGTTGGGGTGACACGGAAAAGATCATGGTTGCCGGTTCGGGTGCTGTGCTTTT |
| | GCAAAAGGCTTTAAGTGATCGTGGTGTCCCGGGCCGTGGCGTGGTGGTTGCCGATACTGGGGTGTATGTGGAGGCGTGTCAG |
| | GCGTTTTTGGAGGGTGTCAGGTCGGGTGTGATCAGTCATCCTCGTGCTGATTCTCGCCGTGACATGTTGGATATTGCTGTGAG |
| | GTCGGCTGTGCAGAAGAAGAAAGGTTCTGCGTGGGGTTGGGGTTCCTTGTTTAAGGATGGTTCTGAGGTTCCTTTGGAGGCTG |
| | TGTCTTTGGCGTATCTTGGTGCGAAGATGGCGAAAGCGAAGCGGCGTGAGAGGTCTGGTAGGAAGCGGGTGTCTGTGGTATG |
| | AACTCGGATGAGTTGGCTCTGATTGAGTGCATGTACGATCGTATCCAAAGGTTGTCTTCATGGCATTGTCGTATTGAGGGCTA |
| | CTATGAGGGCTCGAGCCGGGTGCGTGATTTGGGTGTGGCTATTCCGCCGGAGTTGCAGCGGGTGCAGACTGTGGTGTCGTGG |
| | CCTGGTATAGCCGTGGATGCTTTGGAGGAGCGTCTGGGTTGGCTTGGCTGGACTAACGGTGACGGCTACGGCCTGGATGGTG |
| | TGTATGCGGCGAATCGGCTTGCTACGGCGTCGTGTGATGTTCATTTGGATGCGCTGATTTTTGGGTTGTCGTTTGTGGCTGTTA |
| | TTCCCCAAGGCGATGGGTCGGTGTTGGTTCGTCCGCAGTCACCCAAGAACTGTACAGGCCGGTTTTCGGCTGACGGGTCTCGT |
| | CTGGATGCTGGCTTTGTGGTGCAGCAGACGTGTGATCCTGAGGTTGTTGAGGCGGAGTTGTTGTTGCCTGATGTGATTGTTCA |
| | GGTGGAGCGGCGAGGTAGCCGTGAGTGGGTTGAGGTGGATCGTATACCGAATGTGCTTGGGGCGGTTCCGTTGGTGCCGATT |
| | GTGAATCGGCGTAGGACGTCGCGTATTGATGGGCGTTCGGAGATTACGAGGTCTATTAGGGCTTACACGGATGAGGCTGTGC |
| | GCACACTGTTGGGGCAGTCTGTGAATCGTGACTTCTATGCCTACCCTCAGCGTTGGGTGACTGGCGTGAGCGGGGATGAGTTT |
| | TCGCAGCCTGGCTGGGTCCTGTCGATGGCTTCTGTGTGGGCTGTGGATAAGGATGATGACGGTGACACTCCGAATGTGGGAT |
| | CGTTTCCTGTCAATAGTCCTACACCGTATTCGGATCAGATGCGGCTGTTGGCGCAGTTGACGGCTGGGGAGGCTGCGGTTCCG |
| | GAACGCTATTTCGGGTTTATCACATCGAATCCGCCATCTGGGGAGGCGCTTGCGGCTGAGGAGTCTCGGCTTGTGAAGCGTGC |
| | TGAGCGGCGTCAGACGTCGTTTGGTCAGGGCTGGCTGTCGGTTGGTTTCCTGGCTGCCAAGTCGCTTGATTAATACGGTAACG |
| | AAGCTGATTTTTTTGTTGATGTTGGTTTGCGGTGGCGTGATGCATCAACACCTACTCGGGCGGCTACAGCGGATGCTGTGACG |
| | AAGCTTGTTGGTGCCGGTATTCTTCCTGCGGATTCTCGGACGGTGTTGGGGATGTTGGGTTTGGATGATGTGCAGGTTGAGGC |
| | TGTGATGCGTCATCGTGCCGAGTCGTCTGATCCGTTGGCGGCGCTGGCTGGGGCTATTTCTCGTCAAACTAACGAGGTTTGAT |
| | GAATGGCTTCGGGTGTTGCGTCGAGGCTGGCTGCTGCCGGGTATCAGCGTGAGGCGATTCGTTTTGCCGGGAAGTATGCGGG |
| | CTATTATGCTGAGCTTGGTCGTTTGTGGCATTCCGGGAAGATGACAGATGCGCAGTATGTGCGTTTGTGTGTGGAGTTGGAGC |
| | GTGCCGGCCATGACGGTTCCGCGGCGCTGGCGGGCAAATTCGTTTCAGATTTTCGGAAGCTTAACGGTGTGGATCCTGGTTTG |
| | ATTGTGTATGACGAGTTTGATGCTGCCGCCGCGTTGGCTAGGTCGTTTTCGACTATGAAGATGATGAATAGTGACCCGGATAG |
| | GGTGAATGATACGATTGATGCGATGGCTGCGGGTGTTGATCGGGCTGTTATGAATGCTGGCCGTGACACGGTTGAGTGGTCT |
| | GCTGGTGCGCAGGGTAGGTCGTGGCGCAGGGTGACTGATGGTGATCCGTGCGCGTTTTGTGCCATGTTGGCTACGAGGTCGG |
| | ATTATACGACTCGGGAAAGGGCGCTTACTACTGGTCATACTCGGCGTCATAAGCGTGCCGGTAAGCGTCCGTTTGGTTCGAA |
| | GTATCATGATCATTGTGGGTGTACGGTGGTTGAGGTTGTGGGGCGTTGGGAGCCCTCCTCTGCGGACACCGCATATCAGCGG |
| | GTTTATGAGAAGGCTCGTGAGTGGGTTGATGATCATGGGTTGCAGCAGTCGCCTGGCAATATTTTGAAGGCTATGCGTACTGT |
| | TGGCGACATGAGATGATGGTTTCCGGTTGTGTACCGCCGGTTATCGGTGCACAGGTTTGTCTCCCGCACGGGGGTCAACAATG |
| | TTGTGTTGTTTTCCGCAAGGAGTGTTAGGTTAGGCTATGGCCGATCAGAGTGTTGAGGAACAGAATGTCGACAATGATGTTGT |
| | TGAGCCCGGAAAGGGTGGAGACATTGTTGATGTTGTGAAGGATGATCAAAGCGGGCAGGCAGGCGATCAGTCGAAGCATGA |
| | TGGTGTAGATAAGCCGTCTGGCACGGATTGGAAGGCTGAGGCCCGTAAGTGGGAGTCTCGTGCTAAAAGTAATTTCGCCGAG |
| | TTGGAGAAGCTTCGCGCCTCGGATGGTGATGCGGGGTCTGTGATTGATGATCTTCGCCGCAAGAATGAGGAACTCGAAGACC |
| | GGATCAATGGGTTTGTTCTTAAGGGTGTGAAGCGTGCTGTTGCGGCCGAGTGTGGCTTGTCGGGTGATGCGGTCGCTTTCTTG |
| | CACGGTAGCGACCGTGAAGCGCTGGTGGAGTCTGCTAAGGCTTTGAAGGGTTTGATCGACCATAGTAGTGGTGGCGCGGGTG |
| | TGCGCCGTCTTGCGGGGAGTGCCCCCGTGGATGATGTTAAACGACGTGAGGGTGTCGCTTTTGTTGATGCTCTTGTCAATAAT |
| | TCTAGGAGATGATTTGTGATGGCTGATGATTTTCTTTCTGCAGGGAAGCTTGAGCTTCCTGGTTCTATGATTGGTGCGGTTCGT |
| | GATCGTGCTATCGATTCTGGTGTTCTTGCTAAGCTGTCGCCTGAGCAGCCGACTATTTTTGGTCCAGTGAAGGGTGCCGTGTTT |
| | TCGGGTGTTCCTCGCGCCAAGATTGTTGGTGAGGGTGAGGTTAAGCCTTCCGCTTCGGTTGGTGTTTCGGCGTTTACTGCGCA |
| | GCCTATCAAGGTTGTGACTCAGCAGCGTGTCTCGGACGAGTTTATGTGGGCTGATGCTGATTACCGTCTGGGTGTTTTGCAGG |
| | ATCTGATTTCGCCTGCTTTGGGTGCTTCGATTGGTCGCGCCGTGGATCTGATTGCTTTCCATGGTGTTGATCCTGCCACTGGTA |
| | AGCCTGCCGCGGCTGTCAAGACTTCGCTGGATAAGACGAAGCATATTGTTGATGCTACGGATTCTGCTACGACTGATCTTGTT |
| | AAGGCTGTCGGCCTGATCGCTGGGGCCGGTTTGCAGGTTCCTAACGGTGTTGCTTTGGATCCGGCGTTTGCTTTTGCTCTGTCG |
| | ACTGAGGTGTATCCGAAGGGGTCGCCGCTTGCCGGTCAGCCGATGTATCCTGCCGCCGGTTTCGCTGGTTTGGATAATTGGCG |
| | TGGCCTTAATGTTGGTGCTTCTTCGACTGTTTCGGGTGCCCCGGAGATGTCGCCTGCCTCGGGTGTTAAGGCTATTGTTGGTGA |
| | TTTCTCTCGTGTTCATTGGGGTTTCCAGCGTAATTTCCCGATCGAGCTTATCGAGTATGGTGACCCGGATCAGACTGGCCGTG |
| | ACCTGAAGGGCCATAATGAGGTTATGGTTCGTGCCGAGGCTGTGCTGTATGTTGCGATTGAGTCGCTTGATTCGTTTGCCGTG |
| | GTGAAGGAGAAGGCTGCCCCGAAGCCTAATCCTCTGGCTGGTAACTGATTCATTTGTTGCGATAATGTTTATGCTGTGTGCAG |
| | GGGGTGGTGTTGTTGGGTATCATTTTGAAGCCTGAGGATATTGAGCCTTTCGCCGATATTCCTAGAGAGAAGCTTGAGGCGAT |
| | GATTGCCGATGTGGAGGCTGTGGCTGTCAGTGTCGCCCCCTGTATCGCTAAACCGGATTTCAAATATAGGGATGCCGCTAAG |
| | GCTATTCTGCGCAGGGCTTTGTTGCGCTGGAATGATACCGGGGTTTCGGGTCAGGTGCAGTATGAGTCTGCGGGCCCGTTTGC |
| | TCAGACTACACGGTCTAATACTCCCACGAATTTGTTGTGGCCTTCTGAGATTGCTGCGTTGAAGAAGTTGTGTGAGGGTGATG |
| | GTGGGGCTGGTAAAGCGTTCACTATCATACCCACTATTAATGGTCGATATGTACATTCTGAGGTGTGTTCCACGGTGTGGGGT |
| | GAGGGTTGCTCGTGCGGATCTGATATTAACGGCTACGCTGGTCCTTTGTGGGAGATATGATATGACCAGTTTTCCTTACGGTG |
| | AAACGGTTGTGATGCTTCAGCCGACTGTTCGCGTCGATGATCTTGGCGACAAGGTGGAAGACTGGTCTAAGCCTGTCGAGAC |
| | TGTGTACCATAACGTGGCCATCTATGCTTCGTTGTCGCAGGAGGATGAGGCCGCGGGGCGTGACTCGGATTATGAGCATTGG |
| | TCGATGCTGTTCAAGTCCCCTGTTGTGGGTGCTGATTATCGTTGCAGGTGGCGTATCCGGGGTGTTGTGTGGGAGGCTGACGG |
| | GTCTCCTATCGTGTGGCATCATCCAATGTCTGGCTGGGATGCGGGCACGCAGATCAATGTGAAGCGTAAGAAGGGCTGATGG |
| | GTAGTGGCTCAGGATGTGAATGTGAAGCTGAACTTGCCGGGTATTCGTGAGGTGTTGAAGTCTTCTGGGGTGCAGGGCATGT |
| | TGGCTGAGCGTGGCGAGCGTGTCAAGCGTGCGGCCTCGGCGAATGTGGGCGGTAACGCTTTCGATAAGGCCCAATACCGTAA |
| | TGGTTTGTCGTCGGAGGTGCAGGTTCACCGTGTGGAGGCTGTGGCCCGTATTGGCACCACCTATAAGGGTGGGAAGCGTATT |
| | GAGGCGAAGCATGGCACGCTGGCTAGGTCGATTGGGGCGGCGTCGTGATCGTCTACGATGACCCCAGGAAGTGGGCTAAAC |
| | GCGTGCTCAAGGATGATGGCTGGCTGTCTGGGATACCATGCACCGGGACAGTGCCGGATAGCTTTGAGGGTGACCTTGTTTG |
| | GTTGGCTCTTGATGGTGGCCCGCAGTTGCATGTGCGTGAGCAGGTTTTTTTGCGGGTGAATGTGTTTTCTGATACGCCGGATC |
| | GGGCTATGTCTTTGGCGCGTCGCGTTGAGGCTGTCCTTGTTGACGGGGTTGATGGTGGCCCGGTGGTGTACTGTAAACGGTCT |
| | ACTGGCCCTGATTTGCTGGTTGATGGTGCACGTTTTGATGTGTATTCGCTTTTTGAGCTGGTGTGTCGGCCTGTCGAATCCGAG |
| | TAAGCGTATCGTTGTTTTTGTTGATTGATTTTTAGTTTGATTGTTTTTGGGGGTTATGATGGCTGCAACACGTAAAGCGTCTAA |
| | TGTTCGCTCTGCTGTTACGGGTGACGTCTATATTGGTAAAGCTCATGCCGGTGACGCTATTGATGGTGTGAAGACGGTTCCTG |
| | AGGGGTTGACTGCTTTAGGGTATCTGTCTGATGACGGGTTTAAGATTAAGCCTGAGCGTAAAACGGATGATTTGAAGGCTTG |
| | GCAGAATGCGGATGTTGTTCGCACGGTGGCTACAGAGTCGTCTATCGGGATTTCTTTCCAGCTGATCGAGTCTAAGAAGGAG |
| | GTTATCGAGCTGTTTTGGCAGTCGAAGGTTACTGCCGGATCCGATTCGGGTTCGTTCGATATTTCTCCTGGTGCTACCACTGGC |
| | GTGCACGCTTTACTGATGGATATTGTGGATGGCGATCAGGTTATTCGCTACTATTTCCCTGAGGTTGAGTTGATCGATCGTGA |
| | CGAGATTAAGGGTAAGAATGGCGAGGTGTATGGGTATGGTGTGACGTTGAAGGCGTATCCTGCCCAGATTAATAAGAAGGGT |
| | GATGCGGTGTCTGGTCGGGGGTGGATGACGGCTTTAAAAGCTGATACCCCTCCGGTTCCTCCGAAGCCTCAGCCGGATCCGA |
| | ATCCGCCGTCCGATAACTGATACACGATTTTAGGGATTGTTGATAGATGAGTGATACTGGTTTCACGTTGAAGATTGGTGACC |
| | GTAGCTGGGTGTTGGCGGATGCGGAGGAGACGGCTCAGGCTGTTCCTGCTCGCGTGTTTCGCCGTGCCGCTAAGATTGCCCA |
| | GTCGGGTGAGTCTGCGGATTTCGCCCAGGTTGAGGTGATGTTTTCTATGTTGGAGGCTGCCGCCCCGGCTGACGCGGTGGAGG |
| | CCCTGAGGGGCTTCCTATGGTTCGTGTGGCGGAGGTTTTCCGTGAGTGGATGGAATACAAGCCTGAAGGTAAGGGTGCCTCG |
| | CTGGGGGAATAGTTTGGCTCCACGGCCTGATTGATGATTATCGTGGGGCCATCGAATACGATTTCCGCACCAAGTTTGGTGTT |
| | TCTGTTTATAGTGTTGGTGGCCCGCAGATGTGTTGGGGTGAGGCTGTCCGGCTGGCTGGCGTGTGGTGTACCGATACGTCTAG |
| | CCAGTTGGCGGCCCACCTGAATGGTTGGCAGCGCCCGTTTGAGTGGTGCGAGTGGGCTGTGCTGGACATGTTGGATCATTAC |
| | AGGTNTGCTAATAGTGAGGGGCAGCCGGAGCCTGTGGCGAGGCCGACGGATGAGCGTAGGGCCCGGTTTACGTCTGGGCAG |
| | GTGGACGATATTTTGGCGCGTGTTCGTGCTGGTGGCNGGGTGTCTCGCGAGATTAATATTATGGGGTGAATAGTGTATGTCTG |
| | GTGAGATTGCTTCCGCATATGTGTCGTTGTATACGAAGATGCCGGGTTTGAAGTCTGATGTTGGTAAACAGTTGTCGGGTGTG |
| | ATGCCTGCTGAGGGTCAGCGTTCGGGTAGCCTGTTTGCTAAGGGTATGAAGTTGGCTTTGGGTGGCGCGGCGATGATGGGTG |
| | CCATTAATGTTGCTAAGAAGGGCCTCAAGTCTATCTATGATGTGACTATTGGTGGCGGTATTGCTAGGGCGATGGCTATTGAT |
| | GAGGCTCAGGCTAAACTGACTGGTTTGGGTCACACGTCGTCTGACACGTCGTCGATTACGAATTCGGCTATTGAGGCTGTGAC |
| | GGGTACGTCGTATGCGTTGGGGGATGCGGCGTCTACGGCTGCGGCGTTGTCTGCTTCGGGTGTGAAGTCTGGCGGGCAGATG |
| | ACGGATGTGTTGAAGACTGTCGCCGATGTGTCTTATATTTCTGGTAAGTCGTTTCAGGATACGGGCGCTATTTTTACGTCCGTA |
| | ATGGCTCGCGGTAAGTTGCAGGGCGATGACATGTTGCAGCTTACTATGGCTGGTGTTCCTGTGCTGTCTTTGCTTGCCAGGCA |
| | GACGGGTAAAACCTCGGCTGAGGTGTCGCAGATGGTGTCGAAGGGACAGATTGATTTTAACACGTTTGCGGCTGCGATGAAG |
| | CTTGGCATGGGTGGTGCTGCGCAGGCGTCTGGTAAGACGTTTGAGGGCGCTATGAAGAATGTTAAGAGCGCCCTGGGTTATC |
| | TTGGTGCTACGGCTATGGCGCCGTTTCTTAACGGGTTGCGGCAGATTTTTGTTGCGTTGAGTCCGGTTATCAAGTCGGTGACG |
| | GATTCTGTGAAGCCGATGTTTGCGTCGGTGGATCAGGGTATTCAGCGGATGATGCCGTGTATTTTGGCGTGGATTAACCGTAT |
| | GCCGGCCATGATTACGAGAATGAATGCACAGATGCGCGCCAAGGTGGAGCAGTTGAAGGGCAGTTTTGCGAGAATGCATTTG |
| | CCTGTCCCTAAAGTGAATTTGGGTGCCATGTTTGCTGGCGGCACCGCAGTGTTTGGTATTGTTGCTGCCGGTGTGGGGAAGCT |
| | TGTTGCAGGGTTTGCCCCGTTGGCGGTGTCGTTGAAGAATCTCCTGCCGTCATTTGGTGCTTTGAAGGGTGCCGCTGGCGGGC |
| | TTGGCGGCGTGTTTCGCGCCTTAGGTGGCCCTGTCGGTATTGTGATCGGGCTGTTTGCGGCAATGTTTGCCACGAACGCCCAG |
| | TTCCGTGCCGCGGTGATGCAGCTTGTGGCTGTGGTTGGCCAGGCGTTGGGCCAGATCATGGCTGCTGTGCAGCCGCTGTTCGG |
| | GATTGTTGCTGGTTTGGTGGCACGGTTGGCTCCCGTTTTTGGCCAGATTATCGGCATGGTTGCCGGTTTGGCTGCCCAGTTGAT |
| | GCCTGTGATTGGTATGCTGGTGGCCCGGCTGGTGCCTGTGATCACGCAGATTATTGGTATGGTGACGCAGGTTGCGGCCATGT |
| | TGCTGCCTACGTTGATGCCGGTTATTCAGGCTGTTGTTGCTGTGATACGGCAGGTTGTTGGTCTTATCCGGTCGCTGATACCAG |
| | TCATCATGTCGATTATGCGTGTGGTGGTGCAGGTTGTTGCGGTTGTGATACAGGTGGTGGCCCGTATTCTTGCGGTTGTGGCT |
| | CCGATGGTGGCTGCTGTGGTGGGGTTTGTTGCCCGTATTGTTGGTGCTGTCGTGTCGGCTGTGGCCCGTGTGATTGCTGCTGTT |
| | GCCCGTGTCGTCTCATGGGTTGTGGCCCATTTGGTGTCTGGTGTGGCGCATATGGGTTCGGCTATACTGAATGGCTGGAAACG |
| | TATTAGGGCGTTTACGTCTGCGTTTATGAGCGGGTTTAAGTCGCTCATTTCTGCCGGTGTGGGCGCTGTTGTCGGGTTTTTTGC |
| | GCGGCTTGGTTTGTCGGTTGCTTCCCATGTTCGGTCTGGGTTTGGCGCGGCTCGTGGTGCTGTTTCGGCTGCGATGAATGGGAT |
| | TCGGAGTGTTGTGCCTTCGGTGGTGTCCGCGGTGGGCTCGTTTTTTGGTTCGATGGCTTCTAGGGTTCGTGGTGCTGCCTCGTC |
| | TGGGTTTAACGGGGCCAGGAGTGTGGCTTCTTCTGCTATGCATGCTATGGGGTCTGCGGTGTCTAGTGGTGTGCATGGTGTGC |
| | TGGGTTTTTTCCGGAATTTGCCTGGCAATATTCGGCGTGCGCTTGGTAATATGGGGACCCTGTTGGTGTCTGCTGGCCGGGAT |
| | GTGGTGTCTGGTTTGGGTAATGGTATCCGGAATGCTATGAGTGGCCTGTTGGATACGGTGCGTAATATGGGTTCTCAGGTTGC |
| | TAATGCGGCGAAGTCGGTGTTGGGTATTCATTCCCCGTCTAGGGTGTTTCGTGAACAGGTTGGCCGCCAGGTTGTTGCCGGTT |
| | TGGCTGAGGGGATCACCGGGAATGCCGGTTTGGCGTTGGATGCGATGTCGGGTGTGGCTGGTCGGTTGCCTGATGCGGTTGA |
| | TGCCCGGTTTGGTGTGCGATCGTCGGTGGGCTCGTTACACCGTATGGCAGGTATCAGCGCATGAATGATAAGAGTGTTGTGGT |
| | GAATGTTAACGGGCCAACCTATGGGGATCCTAACGAGTTTGCGAAGCGGATTGAGCGGCAGCAGCGTGACGCGTTGAACGC |
| | GTTGGCTTACGTGTGATTGCGGGGTGTGGTTCATGTTTATTCCTAACCCGTCTGATCGTGCCGGTTTGACGGTGGATTGGACG |
| | ATGTTTCCGTTGATCGGTAATAATCCGGAGCGTGTTCTTCATTTGACGGATTATACGGGTGCGTCCCCGGTCATGTTGTTGAAT |
| | GATTCGTTGCGCGGTTTGGGTGTTCCTGAGGTGGAGCATTTTTCTCAAACTCATGTTGGGGTGCACGGCTCGGAGTGGCGCGG |
| | GTTTAATGTGAAGCCTCGCGAGGTGACATTACCTGTGTTGGTGTCGGGTGTTGACCCGGATCCGGTGGGCGGGTTTCGTGACG |
| | GTTTTTTGAAAGCCTATGACGAGTTGTGGTCTGCTTTTCCTCCGGGCGAGGAGGGGGAGTTGTCGGTGCGGACCCCGGCGGGT |
| | GTTGAGCGTGTGTTGAAGTGCCGGTTTGATTCGGCGGATGACACGTTTACGGTTGATCCGGTTAATCGTGGCTATGCGCGCTA |
| | TCTGTTGCATTTGACAGCCTATGACCCGTTTTGGTATGGGGATGAGCAGAAGTTTCGTTTCAGTAACGCGAAGTTGCAGGATT |
| | GGTTGGGTGGCGGCCCTGTCGGCAAGGATGGTACGGCGTTTCCTGTGGTGTTGACGCCTGGTGTGGGCTCTGGTTGGGATAAT |
| | CTGTCTAATAAGGCTCATGTGCCTG |
| | SEQ ID NO.: 4; >3530 len: 1909 cycle: O |
| | CCCTAATACGATTCCAGCCAGCCTGAACCACCGAACCCATACGCGCCAAACCAGACACAAAATGGGCCACAACCCACCCAAC |
| | AACACGGGCAACAGCAGCAAAAACACGGGCCACAGCCGACACAACAGCACCAACAATACGGGCAACAAACCCCACCACAG |
| | CAGCCACCATCGGAGCCACAACCGCAAGAATACGGGCCACCACCTGTATCACAACCGCAACAACCTGCACCACCACACGCAT |
| | AATCGACATGATGACTGGTATCAGCGACCGGATAAGACCAACAACCTGCCGTATCACAGCAACAACAGCCTGAATAACCGG |
| | CATCAACGTAGGCAGCAACATGGCCGCAACCTGCGTCACCATGCCAATAATCTGCGTGATCACAGGCACCAGCCGGGCCACC |
| | AGCATACCAATCACAGGCATCAACTGGGCAGCCAAACCGGCAACCATGCCGATAATCTGGGCAAACACTGGCGCCAACCGT |
| | GCCACCAGCCCCGCAACCAAACCAAACAGCGGCTGAAGAGCGGCCATAATCTGGCCCAGGGCTTGGCCAACCACAGCCACA |
| | AGCTGCATCACAGCGGCACGGAACTGGGCGTTCGTAGCAAACATGGCAGCAAACAGCCCGATCACAACACCGACAGGGCCA |
| | CCCAGGGCACGGAACACGCCGCCAAGACCCCCGGCGGCACCCTTCAAAGCACCAAACGATGGTAGCAGATTCTTCAACGAC |
| | ACCGCCAACGGGGCAAACCCCGCAACAAGCTTCCCAACACCTGCAGCAACAACACCGAACACGGCGGTGCCGCCAGCAAAC |
| | ATGGCAGCCAAATTCACTTTAGGGACAGGCAAATGCAGCCTCGCAAAAATGCCCTTCAACTGCTCCGCCTTGGCGCGCATCT |
| | GTGCATTCATTCGTGTGATCATAGCCGGCATCCGGTTAATCCACGCCAAAATAGACGGCATCATCCGCTGAATACCCTGATCC |
| | ACCGACGCAAACAGGGGCTTCACAGAATCCGTGACAGACTTAATAACCGGATTCAACGCAACAAAAATCTGCCGCAGACCG |
| | TTAAGAAACGGCGCCATAGCCGTAGCACCAAGATAACCCAGGGCACCCTTAACATTCTTCATAGCGCCCTCAAACGTCTTAC |
| | CAGACGCCTGCGCAGCACCACCCATGCCAAGCTTCATCGCAGCCGCAAACGTGGCAAAATCAATCTGCCCCTTCGACACCAT |
| | CTGCGACACCTCGGCCGACGTTTTACCCGTCTGCCTGGCAAGCAAAGACAGCACAGGAACACCCGCCATCGTAAGCTGCAAC |
| | ATGTCATCGCCCTGCAACTTACCGCGAGCCATCACAGACGTAAAAATAGCGCCCGTATCCTGAAACGACTTACCAGAAATAT |
| | AAGACACATCGGCGACAGTCTTCAACACATCCGTCATCTGCCCGCCAGACTTCACACCCGAAGCAGACAACGCCGCAGCCGT |
| | AGACGCCGCATCCCCCAACGCATACGAAGTACCAGTCACAGCCTCAATAGCCAAATTCATAATCGAAGACGTGTCAGAAGAC |
| | GTGTGACCCAAACCAGTCAACTTCGCTTGGGCCTCATCAATAGCCATAGCGCGAGCTATACCGCCACCAATAGTCACATCAT |
| | AAATCGACTTGAGGCCCTTCTTAGCAACGTTGACGGCACCCACCATTGCGGCGCCACCCAAAGCCAACTTCATACCCTTAGCA |
| | AACAGGCTACCCGAACGCTGACCCACAGCAGGCATCACACCCGACAACTGATTACCAACATCAGACTTCAAACCCGGCATCT |
| | TCGTATACAACGACACATACGCGGAAGCAATCTCACCAGACATACACTATTCACCCCATAATATTAATCTCGCGAGACACCC |
| | CGCCACCGGCACGAACACGCGCCAAAATAT |
| | SEQ ID NO.: 5; >3531 len:2184 cycle: O |
| | GGGTATGAAGTTGGCTTTGGGTGGCGCCGCAATGGTGGGTGCCATCAACGTGGCTAAGAAGGGTCTCAAGTCTATCTATGAT |
| | GTGACTATTGGTGGCGGTATTGCTAGGGCGATGGCTATTGATGAGGCTCAGGCTAAGTTGACTGGTTTGGGTCACACGTCTTC |
| | TGACACGTCTTCGATTATGAATTCGGCTATTGAGGCTGTGACTGGTACGTCGTATGCGTTGGGTGATGCGGCTTCTACTGCGG |
| | CGGCGTTGTCTGCTTCGGGTGTGAAGTCTGGCGGGCAGATGACGGATGTGTTGAAGACTGTCGCGGATGTGTCTTATATTTCG |
| | GGTAAGTCGTTTCAGGATACGGGCGCTATTTTTACGTCTGTGATGGCTCGCGGTAAGTTGCAGGGCGATGACATGTTGCAGCT |
| | TACGGTGGCGGGTGTTCCTGTGCTGTCTTTGCTTGCCAGGCAGACGGGTAAAACGTCTGCTGAGGTGTCGCAGATGGTGTCGA |
| | AGGGGCAGATTGATTTTGCCACGTTTGCGGCTGCGATGAAGCTTGGTATGGGTGGTGCTGCTCAGGCGTCTGGTAAGACGTCT |
| | GAGGGCGCTATGAAGAATGTTAAGGGCGCTTTGGGCTATCTTGGCGCTACTGCTATGGCCCCGTTTCTTAACGGGTTGCGGCA |
| | GATTTTTGTTGCGTTGAATCCGGTTATCAAATCGGTTACGGATTCTGTGAAGCCTTTGTTTGCGTCGGTGGATCAGGGTATTCA |
| | GCGGATGATGCCGTCTATTTTGGCGTGGATTAACCGTATGCCGGGCATGATCACGAGAATGAATGCACAGATGCGCGCCAAG |
| | GTGGAGCAGCTGAAGGGCATTTTTGCGAGAACGCATTTGCCTGTCCCTAAAGTGAATTTGGGTGCCATGTTTGCTGGCGGCAC |
| | CGCAGTGTTCGGTATTGTGGCTGCCGGGGTGGGGAAGCTTGTTGCAGGGTTTGCCCCGTTGGCGGTTGCGTTGAAGAATCTAC |
| | TGCCGTCGTTTGGTGCTTTGAAGGGTGCCGCTGGCGGGCTTGGCGGCGTGTTTCGCGCCCTGGGTGGCCCTGTCGGGATTGTG |
| | ATCGGCTTGTTTGCTGCCATGTTTGCCACTAACGCCCAGTTCCGTGCCGCTGTTATGCAGCTTGTTGGTGTGGTTGGCCAGGCT |
| | TTGGGGCAGATCATGGCTGCTGTGCAGCCGCTGTTCGGGATTGTTGCTGGTCTGGTGGCACGGTTGGCTCCCGTTTTTGGCCA |
| | GATTATTGGTTTGGTTGCCGGGTTGGCTGCCCAGTTGATGCCTGTGATTGGTATGTTGGTGGCCCGTCTTGTTCCTGTGATCAC |
| | GCAGGTTATTGGTATGGTGACGCAGGTTGCGGCCATGTTGCTGCCTACGTTGATGCCGGTTATTCAGGCTGTTGTTGCTGTGA |
| | TACGGCAGGTTGTTGGTCTTATCCGGGCGCTGATACCAGTCATCATGTCGATTATGCGTGTGGTGGTGCAGGTTGTTGCGGTT |
| | GTGATACAGGTGGTGGCCCGTATTCTTGCGGTTGTGGCTCCGATGGTGGCTGCTGTGGTGGGGTTTGTTGCACGTATTCTTGG |
| | CGCTATTGTGTCTGCTGCAGCCCGGATTATTGGGACTGTCACCCGTGTCATTTCATGGGTTGTGAATCATTTAGTGTCTGGCGT |
| | GAGGTCTATGGGCACGGCCATCTTGAATGGCTGGAATCATATTAGAGCGTTTACGTCTGCGTTTATTAACGGTTTCAAGTCGG |
| | TGATTTCTGGCGGCGTGAACGCGGTTGTGGGGTTTTTTGCCCGGCTGGGTTCTTCGGTTGCTTCTCATGTGAGGTCTGGTTTTA |
| | GCGCGGCTCGTGGCGCTGTTTCTTCTGCGATGAATGCTATCCGGAGTGTTGTGTATTCGGTGGTGTCCGCGGTGGGCTCGTTTT |
| | TTGGTTCGATGGCTTCTAGGGTTCGTGGTGCTGCCTCGTCTGGGTTTAACGGGGCCAGGAGTGTGGCTTCTTCTGCTATGCATG |
| | CTATGGGGTCTGCGGTGTCTAGTGGTGTGCATGGTGTGCTGGGTTTTTTCCGGAATTTGCCTGGCAATATTCGGCGTGCGCTTG |
| | GTAATATGGGGTCCCTGTTGGTGTCTGCTGGCCGTGATGTGGTGTCTGGTTTGGGTAATGGTATCCGGAATGCTATGAGTCTG |
| | TCTCTTATACACATCTGACG |
| | SEQ ID NO.: 6; >3532 len: 1031 cycle: O |
| | CCCCTCAAAAACCTGTACTGCACCGACACAACAATGGCACCCAAACCAACCATCTCAATATTCACACTCTTAGAACCGCCAG |
| | GCGGGATAGGGGCAAACTCCCACTCCTTCAAACGATCCATCACATCCTCAAACCCGTTCAACAATGCAGACTGTTTGCGAGG |
| | ATCCGTATCAATAGTGATCCAATCATACTCCTCGACAGGATAGTCCGAAGACACACGCAAACCATCAATCTGCACAGACCAC |
| | GACTCCAAAGGCCCCTCAACACGAATCACAGGCCACGCAGGCACATCACCCTTATTAGACAGGTTATCCCAACCAGAACCAA |
| | CACCAGGCGTCAACACCACCGGAAACGCAGTACCCTTCTTATTAACAGGGCCGCCACCCAACCAATCCTGCAACTTCGCGTT |
| | ACTGAAACGAAACTTCTGCTCATCCCCATACCAAAACGGGTCATAGGCTGTCAAATGCAACAGATAGCGCGCATAGCCACGA |
| | TTAACCGGATCCACCGTAAACGTGTCATCCACCGAATCAAACCGGCATTTTAGCGCACGCTCAACACCGGCAGGAGTCTTCA |
| | CCGACAACTCCCCCTCCTCGCCCGGAGGAAAAGCAGACCACAACTCGTCATAGGCTTTCAAAAAACCGTCACGAAACCCGCC |
| | CACCGGATCCGGGTCAACACCCGACACCAACACCGGCAGCGTCACCTCGCGAGGCTTCACATTAAACCCGCGCCACTCCGAG |
| | CCGTGCACCCCAACATGTGTTTGAGAAAAATGCTCCACCTCAGGAACACCCAAACCGCGCAACGAATCATTCAACAACATCA |
| | CCGGAGACGCACCCGTATAATCCGTCAAATGAAGCACACGCTCGTCGCCAGACAGCGGATCCATAAACCATGTCACAGTCAA |
| | ACCCGAACGATCAGACGGGTCAGGAATAAACATGCACAACACCCCAATCACACGTAAGCCAACGCGTTCAAAGCGTCACGC |
| | TGCTGCCGCTCAATCCGCTTCGCAAACTCGTTAGGATCACCATAAGTA |
| | SEQ ID NO.: 7; >3533 len: 1357 cycle: O |
| | GAAGCATAGATGGCCACGTTATGGAACCCAGTCTCGACAGGCTTAGACCAGTCTTCCACCTTGTCGCCAAGATCATCGACAC |
| | GAACAGTCGGTTGAAGCATCACAACCGTTTCACCATAAGGAAAACTGGTCATATCATATCTCCCACAACGGGCCATCATGGC |
| | CGTTAATGTTAGACCCGCACGAGCAGCCCTCACCCCACACCGTGGAACACACCTCAGAATGAGCATATCCACCACGAATCGT |
| | GGGTGTGATCGTGAACGCTTTACCAGCCCCACCATCACCCTCACACAACTTCTTCAACGCAGCAATCTCGGAAGGCCACAAC |
| | AAATTCGTGGGCGTATTAGACCGTGTAGTCTGGGCAAAAGGACCCGCAGACTCATACTGCACCTGCCCCGAAACCCCGGTAT |
| | CATTCCAGCGCAGCAAAGCCCTACGCAGAATAGCCTTAGCGGCATCCTTATATTTGAAATCCGGTTTAGCGATACAGGGGGC |
| | GACACTGACAGCCACAGCCTCCACATCGGCAATCATCGCCTCAAGCTTCTCTCTAGGAATATCGGCGAAAGGCTCAATATCCT |
| | CAGGCTTCAAAATGATACCCATCAACACCACCCCCTGCACACAGCATAAACATTATCGCAACAAATGAATCAGTTACCAGCC |
| | GGAGGATTAGGCTTCGGGGCAGCCTTCTCCTTCACCACGGCAAACAAATCAAGCGACTCAATCGCAACATACAGCACAGCCT |
| | CGGCACGAACCATAACCTCATTATGGCCCTTCAGGTCACGGCCAGTCTGATCCGGGTCACCATACTCGATAAGCTCGATCGG |
| | GAAGTTACGCTGGAACCCCCAATGAACACGAGAGAAATCACCAACAATAGCCTTAACACCAGAGGCAGGCGACATCTCCGG |
| | GGCGCCAGAAACAGTCGAAGAAGCACCAACATTCAGGCCGCGCCAATTATCCAAACCGGCAAACCCGGCGGCAGGATACAT |
| | CGGCTGGCCGGCAAGCGGAGACCCCTTCGGATACACCTCAGTCGACAGAGCAAACGAGAACGCCGGATCCAAAGCAACACC |
| | GTTAGGAACCTGCAAACCAGCACCAGCGATAAGGCCGACAGCCTTAACAAGATCGGTCGTAGCAGAATCCGTGGCATCAAC |
| | AACATGCGTCGTCTTATCCAGCGAAGACTTGACAGCCGCAGCAGGCTTACCCGTAGCCGGATCAACACCATGGAAAGCAATC |
| | AGATCAACAGCGCGACCAATCGAAGCACCAAGAGCCGGGGAAATCAGATCCTGAAGCACACCCAGACGGTAATCAGCATCA |
| | GCCCACATAAACTCGTCCGAGACACGCTGCTGAGTCACAACCTTAATAG |
| | SEQ ID NO.: 8; >3534 len: 1122 cycle: O |
| | GGCGACATCTGTGGTTGTGGGTGGCCGCGGCGAGGGCCGGGATCGGCTGTTTTGTGAGGATGTTGATTCGATGGCCGAGGAT |
| | GACTGGTTTGATCGTGTCGAGGTGTTTAAGGATGCCCGTAACACGGATTCTGAGCATGTGCATCTCATCGATGAGGCTGAGCA |
| | GGTGCTGTCCGAGTTGGGGGCCACGTCGGGGTTTAAGATTGAATTGGCTGAGTCGGAGGTGTTGCGTTTTGGGCCAGGCAAT |
| | CTGATGCCGGGTGATTTGATCTATGTGGATGTGGGTTCGGGCCCTATTGCGGAGATTGTTCAGCAGATTGATGTGGAGTGTGT |
| | ATCGCCTGGTGATGGTTGGACGAAGGTGACTCCGGTTGCGGGGGATTATGAGGATAATCCGTCGGCCCTGTTGGCTCGCCGT |
| | GTGGCTGGTTTGGCTGCGGGTGTGCGGGATTTGCAAAAATTTTAGAAAAGAATTGGTGGTTTGTTGTGGGTATTGTGTGTAAA |
| | GGGTTTGATGGTGTGTTGACCGAGTATGATTGGGCTCAAATGTCTGGTCTGATGGGTAACATGCCTTCGGTTAAGGGGCCGGA |
| | GGATTTTCGTGTCGGCACTACTGTTCAGGGTGCCACGGTGTTGTGTGAGGTTTTGCCGGGGCAGGCTTGGGCTCACGGGGTGA |
| | TGTGCACGTCGAATAGTGTTGAGACGGTGACGGGCCAGCTGCCGGGCCCTGGTGAGACCCGCTACGACTATGTGGTGTTGTC |
| | TCGGGATTGGGAGCAGAACACAGCCAAGTTGGAGATTGTTCAGGGTGGCCGTGCGGAGCGTGCCCGTGACGTGTTGCGTGCC |
| | GAGCCTGGCGTGTACCATCAGCAGCTACTGGCTACTTTGGTGGTGTCGTCTAACGGGTTGCAGCAGCAGTTGGATAGGCGTG |
| | CTGTGGCGGCTAGGGTTGCGTTTGGGGAGTCTGCTGCGTGTGATCCTACCCCTGTGGAGGGTGACCGTNTGATGGTTCCTTCT |
| | GGGGCTGTGTGGGCTAACCATTCGGGCGAGTGGATGCTACTGTCTCCGAGGATTGAGACGGGTTCGAAGTCTATCATGTTTG |
| | GTGGATCGAACGTGTATGCTTACACGATCCCGTTCGAGCGGCCGTTTACT |
| | SEQ ID NO.: 9; >3535 len: 1324 cycle: O |
| | CTATTACACCGACCATGAGGAGTAGTGTGAATCATTCTGAGGTGTGTTCCACGGTGTGGGGTGAGGGTTGCTCGTGCGGGTC |
| | GAATATTAACGGCTACGCTGGCCCTTTGTGGGAGATATGATATGACCAGTTTTCCTTATGGTGAAACGGTTGTGATGCTTCAA |
| | CCGACTGTTCGCGTCGATGATCTTGGTGACAAGGTTGAGGATTGGGGGCATCCTGTAGAAACCGTGTACCATAACGTGGCCA |
| | TCTATGCTTCCGTTTCACAGGAGGATGAGGCCGCGGGGCGTGACTCTGACTATGAGCATTGGTCGATGCTTTTCAAGCAGTCT |
| | GTTGTGGGTGCTGATTATCGTTGCCGGTGGCGTATTCGGGGTGTTGTGTGGGAGGCTGACGGGTCTCCTATGATGTGGCATCA |
| | CCTAATGTCCGGTTGGGATGCGGGCACGCAGGTTAATGTGAAGCGTAAGAAGGGCTGATAGATTGTGGCTCAGGATGTGAAT |
| | GTGAAGCTGAACTTGCCGGGTATTCGTGAGGTGTTGAAGTCTTCTGGGGTGCAGGGCATGTTGGCTGAGCGTGGTGAGCGTG |
| | TCAAGCGTGCAGCCTCTGCGAATGTGGGCGGTAACGCTTTCGATAAGGCCCAATACCGTAATGGTTTGTCGTCAGAGGTGCA |
| | GGTTCACCGTGTTGAGGCTGTCGCTCGTATAGGCACCACATATAAGGGTGGGAAGCGTATTGAGGCGAAGCATGGCACGCTG |
| | GCTCGTTCGATTGGGGCTGCGTCGTGATCGTCTACGATGACCCCAGGAAGTGGGCTAAACGCGTGCTCAAGGATGATGGCTG |
| | GCTGTCTGGGATACCTTGTACTGGGACAGTGCCGGATAGTTTTGAGGGTGACCTTGTTTGGTTGGCTCTTGATGGTGGCCCGC |
| | AGTTGCATGTGCGTGAGCAGGTTTTTTTGCGGGTGAATGTGTTTTCTGATACGCCGGATCGGGCTATGTCTTTGGCGCGTCGC |
| | GTTGAGGCTGTCCTTGTTGACGGGGTTGATGGTGGCCCGGTGGTGTACTGTAAACGGTCTACTGGCCCTGATTTGCTGGTTGA |
| | TGGTTCACGTTTTGATGTGTATTCGCTGTTCGAGCTGATATGTAGGCCTGCGGAGTCCGAATAAGCTTATTGTTTTTGTTTTAA |
| | TGTAATTGTTTGATATTTAATGGGGGTTATGATGGCTGCAACACGTAAAGCGTCTAATGTTCGCTCTGCTGTTACGGGTGACG |
| | TCTATATTGGTAAAGCTCATGCCGGTGACACTATTGATGGTGTGAAGACGGTTCCTGAGGGGTTGACTGCTTTAGGGTATCTG |
| | TC |
| | SEQ ID NO.: 10; >3536 len: 1069 cycle: O |
| | GTGTCGAATCGTCCGACGCAGTGGCAGTAGTCGTACATGAGTTTAATAATGTGTTGGTGGTCGCCAAGGTAGGGGTTTGCGCT |
| | GATGCTGTAGGTGGCTGTGCCGTCTTTGCTAATAGTGTATTTGGCGGTGATGGTTTGGGGGTTTTCTGTGTTGGTGATAATTGC |
| | TGTGGTGGTGGCGCCTACGGTTTGGAGGACGGTGGTTTGGGTTCCGTCGTCTAGTGTTGTGGTAACCATAATTGGGGTTCTCC |
| | TTTAGATGCTTGTCTGGTGGTCGGCTAGATGAATAATATCGGATAAAGGTTTCGGTTGGTCTAGGTGTTGTATGGTTTTGTTGG |
| | CTAGCCGTTTGGCTGCCCTGTAACACATTTTGGTGTAGTGTTTGTTGTCTAGGTTGTGGTATTGTTCACGTACCGCAATATATA |
| | GTAGAGAGTCTTGGTACAGGTCGTCGGGGTTGACGGCCGGGTAGTGGCGGGCAATGTTGGTGCAAGCTTTGTGTAGCTGGTG |
| | TTGGTGGTGGTGGGTTGCCCACCCCCAGTTGGCGGTGGTGGCTTGTTGGACTTTGGTTGGTCGTCTACTCATGGTTTTTATCTC |
| | GCTATCTGATAGTTGTTTGGTGTTTTGTTGTTGATAGTGTAGCACACTAGTCCGGGGTTTCCGGTGGTGCCTGTGCGGTGCCGG |
| | TACCAGACTGATTCTCCTTCCATGGATGGGCATTGGATGAAGGTGCGTTGTCCTTGCTCGGAGATTTCTAGGTGGTGCCGGTG |
| | GCCTGCCATCAGGATGTGTGATGTGGTGCCGTTGTGGAATTCTTGGCCGCGCCACCATTCGTAGTGTTTGCCGGTGCGCCATT |
| | GGTGTCCGTGGGCGTGCAGGATGGTAGCCCCGGCTACGTTGACGGTGGTGGTCATTTCGTCGCGTTGGGGGAAATAATAGTG |
| | GAGGTTGGGGTAGTTGTTGGTGAGTTGGTAGGCTTCTGCGATGGCGCGGCAGCAGTCCACGTCGAATGAATCATCGTAGGTC |
| | GTGACGCCTTTGCCGAATCTAACGGCTTCTCCGTGGTTGCCGGGCATGGAGGTGACCGTAAGGTAGGACCA |
| | SEQ ID NO.: 11; >3537 len: 1224 cycle: O |
| | CGTGTTTGGGCGCAGCTTGTGGAGTTCGGCTTCCACGCTCTGCCGGTAGGCTTCGGCGAGGCCCTCAAAATCCATGTGGTCGC |
| | AGGAGAGGTTTTCGAGGCGTGTCAGGTCGAAGGGTGTGGGGCAGTCGTAGCTGGCGGGGGTGTAGAGCTGGGTGAAGTGGT |
| | TGGCGATCTTCTGCATGACTGGTTCCTTTCTGGTGTGTGGATGGTTTTTATCGTGTGGCTTCGGCGATGATGGCGTCCACATCG |
| | ATTGTGTCGATCATGTCGTGGAGTTCCTCAGTCTCATCTGGGGTGAGTGGCTGCCAGTTGCGTGGCCCATACACTGCACCGTC |
| | GAGAGTGATGGTCCACAGGGGTCGGATGAGTCGTACGGCTTCTTCGACTTTGGCACGGTATAGGCGGCAGATGATAGACGTG |
| | TGGGTGTTACCTATGTCACATCCTGCCAGGTGTGTGGGGTGGAGTGGGTTGATTTCTGTTTGCCCGTAGAGGCTGGTGAAGGA |
| | TGGGGTGATGAGTGTGGTGGCCATTTTTGGTGTGTTCCTTTCGGTGGTGTATGGGTTGTTGTGGTTTCTAGAGTGTGTAGGTTG |
| | CAACCGGGAGTCAAGGCTGCGCTCAACCGGATTGAGCGTTTCATGCTGGAGTGTCGGGTGTGACAGATGCCACTTAAGCCTT |
| | TATGGCATCCCTCAGCGTCTCAAATCTTCTGGGGGTAGGATTATGCAGGGTTGGCCCTGCTGATCGATTCTAGGGCCTTCTAG |
| | GGCGTCTCAGGGGTATGTCTGGGTGATAGCAGGTCCGGTAGATGACCCGGCAGATCTACCTTGGCTTTCATCACGGGGGTCG |
| | AGATGCCATATCTGGACATGGAATCTAAACCCTCATACTGTGTGAGATGTATCACACTCGCCTAGTATGGTGTGCACCCTCGA |
| | GGCTACTCTGTCGATCTTGCGTGGAGGGTGTAGCCCAGAAATGCCGTTTAAAGCTTCAGGGGTACGCCTAGGAGCGCCTTAC |
| | AGGATGGTGGCTAGGTATTTATACCACCAAGCAATTCTGATCGATTCTAGACGCCTCCAGGAGACTGATACGCGATCCGCTAT |
| | CCAGACGCCGACCACCAGCCCCTATCCTGGTTAGCTAAGCCTCAACTATGTGGACAGTGTGGGATACTGTGGGGGGAGAAGG |
| | ACGCGGTAAAAGAAAGAGGGGGGCATCAGCCTTAGGGTCTTAGCACTGATGGACTTAGCACCGAGCC |
| | SEQ ID NO.: 12; >3538 len: 1266 cycle: O |
| | CATCGGCGCCCACAAAGACTCCTTTACTTTCGCCTACGGTGCCACCACCAAGCAACCCGGAGCATCCAAGGCACAATTGAAA |
| | GTCTTCTGCCAAGTCTCTGGCACCGAAGACAAGCCGCAGGTAGAGGACATGTCCATCAACCCTTCACGCTAACCCGAAAGAC |
| | AACACACCCATTATGCCTCTCATGTCCACCTACATGGCTAATGCGGGCCTGTCCGACATCATGCACATCCTCCATACCGCCGG |
| | GGGAGCCTGCCGGACAGGCACCGACATCGCCGCACGAATCAACACACTCCACCCAGAATACAATCTCCAAGCCACCACCGA |
| | CCAGCTCATCGACATCGAAAACCGCATCGACACTATTCGCAAAAACATTCAAAAAGAAATCAAGAAACACCCGTGAACATC |
| | ACCGACCACACCACCCCAGACCTGCACTCCTACGAAACGTTCTTCACCAGCCTCGCATGGATCCAAGGCGGCATCATCACAT |
| | GGATGTACGCAACCGGCACCCCACACAAGGCAGCCCTCGCCATTATTGCCGCATGCGCCCTCGCCACCCTCCTGGGTGCATC |
| | AACACTCACATACAAGCCCAAAGACAGCAAATGATCACAACACCCATACTGATCGCTGAAACCCTCGCCATAATTATTCTCG |
| | CAGTAGCACTCGCCCACAACAACAACCAGTAACCCACCCTTAAGGAGCACACATCTCATGGATGAGCCCACCCGCATGTACA |
| | CCGACCCCAACACCGGTGCCCGAAAAGAATTGAAACTCTGCAGGCTCTCCCTCATCGACCCCGCATCCCTTCACGCTCTCGGC |
| | GAAGTAGCAGGCTACGGTGCCACCAAATACGGCGACAACAACTGGACCGGAGGATACCCGTGGAGCCACAGTGTCGACGCC |
| | CTCTACCGCCACCTACTATCATGGCAGCAAGGCAACAACCTCGACCGCGAATCCGGGCTACCCCATTTGGCACACGCCGCCT |
| | GGCACTGCCTCGCACTCCTCGCATACCAGCAACACAATGCCGGGGTAGACACCCGCAACCCATGGAACACCCACAAAGGCG |
| | ACCAGTAATGCCTCTAGCACAATACCCGAAAACCATCCACCATCCAGGCCACATCTCCTACTCATCACTGTCACAGTGGGCCG |
| | AATGCGGAGAAAAATGGCGCCTATCCCACGGCTACCACACCCAACACCACACCTGGTACGCCACCATCGCCGGAAGCGCCAT |
| | ACACCACATCACCGAACAATACGACCTACACCTGTAC |
| | SEQ ID NO.: 13; >3539 len: 1481 cycle: O |
| | GTCTGGGGCCACGTCGGGGTTTAAGATCGAGTTGGCGGAGTCGGATGTGTTGCGGTTTGGGCCCGGCAATCTGATGCCAGGG |
| | GATTTGATCTATGTGGATGTGGGCTCGGGTCCTATTGCGGAGATTGTTCGGCAGATTGATGTTGAGTGTGTATCGCCTGGGGA |
| | TGGGTGGACGAAGGTGACACCGGTTGCCGGTGATTATGAGGATAATCCGTCGGCTTTGCTGGCTCGCCGTGTGGCTGGTTTGG |
| | CTGCCGGTGTGCGGGATTTGCAAAAATTCTAGAATGATGGGGGTTTGTTGTGGCTATTGTGTGTAAAGGGTTTGGTGGTGTGT |
| | TGACCGAGTATGATTGGGCTCAAATGTCTGGTCTGATGGGTAATATGCCGTCCGTGAAAGGGCCGGACGATTTTCGTGTCGGC |
| | ACGACGATTCAGGGTGCCACAGTGTTGTGCGATGTCCTGCCGGGGCAGGCTTGGGCTCACGGGGTGATGTGCACTTCTAGTA |
| | GTGTTGAGACGGTGACAGGGCAGCTGCCTGGCCCTGGTGAGACCCGATACGACTATGTGGTGTTGTCTCGGGATTGGGAGCA |
| | GAACACAGCCAAGTTGGAGATTGTTCAGGGTGGCCGTGCGGAGCGTGCCCGTGACGTGTTGCGTGCCGAGCCTGGCGTGTAC |
| | CATCAGCAGCTACTGGCTACTTTGGTGGTGTCGTCTAACGGGTTGCAGCAGCAGTTGGATAGGCGTGCTGTGGCGGCTAGGG |
| | TTGCGTTTGGCGAGTCTGCTGCGTGTGATCCTACCCCTGTGGAGGGTGATCGTGTGATGGTGCCTTCGGGGGCTGTGTGGGCT |
| | AACCATGCCGGGGATTGGATGTTGTTGTCTCCCAGGGTTGAGACGGGTTCGAAGTCTATCATGTTTGGCGGGTCTGCTGTGTA |
| | TGCTTACACGATCCCGTTCGGGCGGCCGTTTACTAGTCCGCCTATCGTGGTGGCGTCTATGGCTACGGCTGCTGGGGGCACGC |
| | AGCAGATCGATGTGAAAGCCTACAATGTGACTGCCCAAAATTTTGGTTTGGCGTTTATTACGAATGATGGTTCGAAGCCGAAT |
| | GGTGTGCCTGGGGTGGCTAACTGGATTGCTGTCGGCGTGTGACCGGGCTGTTGTTGTGGCGGATGTTGTGATATTTGGGGGCT |
| | GTGGTGTCGTGGTTTACTCCTGCACTGGTGGCCTCTATCTGTACCGCATTGGCCACGGTTTTGGGTTCGGTTCAGGCTGCCACA |
| | TCTAAATCTCAGAAGCGTTTGCGGCGGCTGTCGGCTCAGGTAGATGCGATGGAAGAGTATACGTGGGGTGTGCGCCGTGAGG |
| | TGCAAAGGTTTAACGCCGGGCTTCCTGATGATGTGGAGCCGATTCATCTCCCTGATGTGCCCGAGTTTTTGAAAGATACTGTT |
| | GATGGTGGAGGTGAGTAGGGTTGAGGGAGTTGGAGGAGGAGAAGCGGCAGCGCCGCAATTTTGAGAAGTTTTCAC |
| | SEQ ID NO.: 14; >3558 len: 11424 cycle: O |
| | GGATCCGGTGAGTCGTGGCTATGCGCGCTATCTGTTGCATTTGACAGCCTATGACCCGTTTTGGTATGGGGATGAGCAGAAGT |
| | TTCGTTTCAGTAACGCGAAGTTGCAGGATTGGTTGGGTGGCGGCCCTGTTAATAAGAAGGGTACAGCGTTTCCGGTGGTGTTG |
| | ACGCCTGGTGTTGGTTCGGGCTGGGATAACCTGTCTAATAAGGGTGACGTGCCGGCGTGGCCTGTGATTCGTGTTGAGGGGC |
| | GGTTGTCATCGTGGTCTGTGCAGATTGATGGTTTGCGTGTGTCTTCGGACTATCCGGTTGAGGAGTATGATTGGATTACTATTG |
| | ATACGGATCCTCGGCAGCAGTCTGCGTTGTTGAACGGGTTTGAGGATGTGATGGATCGTTTGACAGAGTGGGAGTTTGCGCCT |
| | ATTCCGCCTGGCGGTTCTCGGAGTGTGAGTATTGAGATGGTTGGTTTGGGTGCCATTGTTGTGTCGGTGCAGTACAGGTTTTT |
| | GAGGGCTAGGTGAATAGTTGATGGCTGGTCTTGTTCCGCATGTAACATTGTTTACGCCGGATTATCGCCGTGTGGCGCCTATC |
| | AATTTTTTTGAGTCGTTGAAATTGTCGTTGAAGTGGAATGGTTTGTCGACGCTGGAGTTGGTGGTGTCGGGGGATCATTCTAG |
| | GCTGGACGGGTTGACGAGGCCTGGTGCACGGCTGGTTGTTGATTATGGTGGTGGCCAGATTTTTTCGGGGCCTGTGCGCAAG |
| | GTGCACGGTGTGGGGCCGTGGCAGTCCTCGAGGGTGACTGTGACGTGTGAGGATGATATTCGGCTGTTGTGGCGCATGTTGA |
| | TGTGGCCTATCAATTATCTTCCCAGTTTTGTGGGTTCGGAGTGGCGTGCGGACAGGGATTATGCCCATTATTCGGGTCCGGCG |
| | GAGTCGGTGGCGAAGAAGGTGTTGCGGGATAATGCTTGGCGGTTTCCGCCGGATGTGTTTCTGACTGATGATGAGAAGCGTG |
| | GACGGTTTATTAAGGATTTTCAGGTGCGGTTTCACGTGTTTGCCGATAAACTGTTGCCGGTGTTGTCGTGGGCTCGGATGACT |
| | GTTTCGGTGAAGCAGTTTGAGGATGTGAAGCTGGATCGGCGTGGTTTGGTGTTTGATTGTGTGCCGGCTGTGACCCGTAGTCA |
| | TGTGTTGACTGCCGAGTCTGGTTCGATTGTGTCGTGGGAGTATGTGCGTGACGCCCCGAAGGCTACTTCGGTGGTGGTTGGTG |
| | GCCGCGGCGAGGGTAAGGATAGGCTGTTTTGTGAGGATGTTGATAGCTTGTCTGAGGGGGAGTGGTTTGATCGTGTCGAGGT |
| | GTTTAAGGATGCCCGTAACACGGATTCTGAACATGTGCATCTTATTGATGAGGCTGAGCGGGTGTTAGGGGAGTCTGGGGCC |
| | ACGTCGGGGTTTAAGATCGAGTTGGCGGAGTCGGATGTGTTGCGGTTTGGGCCCGGCAATCTGATGCCAGGGGATTTGATCT |
| | ATGTGGATGTGGGCTCGGGTCCTATTGCGGAGATTGTTCGGCAGATTGATGTGGAGTGTGTATCGCCTGGTGACGGGTGGAC |
| | GAAAGTAACACCGATTGCGGGGGATTATGAGGATAATCCGTCAGCTTTGCTGGCGCGGCGTGTGGCTGGTTTGTCTGCGGGT |
| | GTGCGGGATTTGCAAAAATTCTAGAATGATGGGGGTTTGTTGTGGCTATTGTGTGTAAAGGGTTTGATGGTGTGTTGACCGAG |
| | TATGATTGGGCTCAATTGTCTGGTCTGATGGGTAATATGCCGTCTGTGAAAGGGCCGGACGATTTTCGTGTCGGCACTACTGT |
| | TCAGGGTTCCACGGTGTTGTGTGAGGTTTTGCCGGGGCAGGCTTGGGCTCACGAGGTGATGTGCACGTCGAATAGTGTTGAG |
| | ACGGTGACAGGGCAGCTGCCTGGCCCGGGTGAGACCCGATACGACTATGTGGTGTTGTCTCGGGATTGGGAGCAGAACACAG |
| | CCAAGTTGGAGATTGTTCAGGGTGGCCGTGCGGAGCGTGCCAGTGACGTGTTGCGTGCCGAGCCTGGCGTGTACCATCAGCA |
| | GCTACTGGCTACTTTGGTGGTGTCGTCTAACGGGTTGCAGCAGCAGTTGGATAGGCGTGCTGTGGCGGCTAGGGTTGCGTTTG |
| | GGGAGTCTGCTGCGTGTGATCCTACCCCTGTGGAGGGTGACCGTGTGATGGTGCCTTCGGGGGCTGTGTGGGCTCACCATGCC |
| | GGCGAGTGGATGTTGTTGTCCCCCAGGATTGAGACGGGCACTAAGCAAATCCAGTTTGGCGGGTCTGCTGTGTATGCTTACAC |
| | GATCCCGTTTGAGCGGCCGTTTAGTAGTGCGCCCGTTGTGGTGGCGTCTATGGCTACGGCGGCTGGGGGCACGGCACAGATT |
| | GATGTGAAAGCCTACAATATTACTAATAAGGATTTTAGTTTAGCGTTTATTACGAATGATGGTTCGAAGCCGAATGGTGTGCC |
| | TGCGGTGGCTAACTGGATTGCTGTCGGCGTGTGACCGGGCTGTTGTTGTGGCGGATGTTGTGATATTGGGGGGCTGTGGTGTC |
| | GTGGTTTACTCCTGCACTGGTGGCCCCTATCTGTACCGCATTGGCCACGGTTTTGGGTTCGGTTCAGGCTGCCACATCTAAATC |
| | TCGGAAGCGTTTGCGGCGGCTGTCGGCTCAGGTAGATGCGATGGAAGAGTATACGTGGGGTGTGCGCCGTGAGGTGCGAAG |
| | GTTTAACGCCGGGCTTCCTGATGATGTGGAGCCGATGCATCTCCCTGATGTGCCCGAGTTTTTGAAAGATACTGTTGATGGTG |
| | GAGGTGAGTAGGGTTGAGGGAGTTGGAGGAAGAAAAAAGGCAGCGCCGCTCGTTTGAGAAGGCTTCCCTGATACTGTTGTTT |
| | TTGTCGCTTGTGCTGTTGGCGGTGGTTGCCGGGGGTGCTTTACGGTACGGGTCTGTGGCTTCGCAAAGGGATTCGGAGCAGGC |
| | GAGGGCCCAGTCTAATGGTACGGCGGCTCGGGGTTTAGCTGCCCGTGTGAAGCAGGCGTGTACTTCGGGTGGGGTGGAGTCT |
| | GCGCGGCTTCACCAGTCTGGCTTGTGTGTGGATGCTGTGCGTGTTGAGCGTAGCGTGCAGGGTGTGCCGGGTCCTGCCGGTGA |
| | GCGCGGCCCGCAAGGGCCTGCAGGTGCTGATGGGCGTGATGGTGTTAATGGTTCGGCTGGGCTGGTTGGCCCTGTTGGTCCG |
| | CAGGGTTCTCCTGGTTTGAATGGTGTGAAAGGTCCTGACGGGTTGCCTGGTGTGAATGGATCGGATGGCCATGATGGTGTTCC |
| | GGGCCGTGCAGGTGCTGATGGTGTGAACGGTGTTGACGGTCGGGATGGTTCGGCCGGTGAGCGCGGTGATGTGGGCCCTTCA |
| | GGTCCTGCCGGCCCGCAAGGTGCACAGGGTGAACGGGGTGAGCGTGGCCCCGCCGATGCGAACGGATCCGATGGTAAAGAT |
| | GGTAAGGATGGCCGTTCTGTTGTGTCTGTGTACTGTTCCGGGGGCCGCCTGGTTGTGAAATATAGTGACGGTACGGCCTCTAC |
| | CATAGCGGGTTCTGCAGCCTGCGAGAGTGTGAAACCATCACCTGTGGTTACCGTATCATCCCATAGGTGAACAAGAAGAGGG |
| | AAGGGTGTTACTAGTGTTGGTCGTGTTTGGTGGTGGTGTGTGGTGAGATACATTCCAGCGGCGCACCATTCGGCCGGTTCGAA |
| | TAGTCCGGTGAATAGGGTTGTGATTCACGCGACATGCCCGGATGTGGGGTTTCCGTCTGCCTCCCGTAAAGGGCGGGCGGTG |
| | TCCACGGCAAACTATTTCGCGTCCCCATCGTCTGGTGGTTCGGCGCATTATGTTTGCGATATTGGGGAGACGGTGCAGTGCTT |
| | GTCGGAGTCTACGATTGGGTGGCATGCCCCGCCTAACCCGCATTCTTTGGGTATAGAGATTTGCGCGGATGGGGGTTCGCACG |
| | CCTCGTTCCGGGTGCCAGGGCATGCTTACACTCGTGAGCAGTGGCTTGATCCTCGCGTGTGGCCTGCGGTGGAGAAGGCTGCC |
| | ATGCTGTGTAGACGTTTGTGTGACAAATATAATGTTCCGAAAAGGAAACTGTCGGCTGCCGATTTGAAGGCTGGCAGGCGTG |
| | GTGTTTGCGGGCATGTGGATGTGACGGATGCGTGGCATCAGTCGGATCATGACGATCCGGGGCCGTGGTTTCCGTGGGACAG |
| | GTTTATGGCCGCCGTCAACGGTGGTAGTGGTAGTGAGGAGTTAACTGTGGCTGATGTGAAAGCCTTGCATGATCAGATTAAA |
| | CAGTTGTCTGGGCAGGTGGCCCAGTCGGTGAACCGGCTGCATCACGATGTTGGTGTGGTTCAGGTGCAGAATGGTGACTTGC |
| | GTAAGCGTGTCGAGGCTTTGTCGTGGGTGAAGAATCCTGTGACGGGGAAGCTGTGGCGCACTAAGGATGCTTTGTGGAGCAT |
| | CTGGTATTACGTGCTGGAGTGTCGCAGCCGTATTGACAGGCTCGAGTCTGCTGTCAGCGGTTTGAAAAAGTGATGGTGGTTTG |
| | TTGTGGGTAAACAGTTTTGGTTAGGTTTACTGGAGCGGGCGGCTAAGACTTTTGTGCAAACGTTTGTTGCGGTGTTGGGTGTG |
| | ACGGCGGGTGTTACTTATACTGCGGAGTCGTTTCGTGGTTTGCCGTGGGAGTCTGCCCTGATCACAGCAACGGTTGCTGCGGT |
| | GTTGTCGGTTGCTACCTCGTTTGGTAGCCCGTCGTTTGTGGCCGGTAAGCCGAAGGTGACGCCTGTTGTGGATGCTGGGCTTG |
| | TTCCACCTGATGACGGGGGCTTGGTTGAGCCGCACTCGGTGGATGTGTCGGATCCTGGCATGATCGAGCCTGTAGACGATGCT |
| | GATCTTGGTGGCTATGTGCCGAGGCGTGCCGCCGAGTCGGAGGTTGGCACGGTAGAGTCTACTGTTGCATAATTGAATATGT |
| | GTGTGCCCCAGCGGTGCTGCCACGATTGTGTGGTGGTTGCCGCTGGGGCACTATTTTTGTGTCTATAGGGGTTTTACAGGTTG |
| | TTGTCTAGTGTGTCTTCGATGAGCTGGTCCAGGTGGAGGCAGGCTGAGATAGTATCGTTGGCCTGGTCTAGAACATCCTGGCC |
| | GATAACGCCTTTGTGGTTGTCGCGGTGGCGGATGATAGCCCACATGATCTCGTCGGCTGCCGCCTGTAATAGTTTTGCCTGGT |
| | ATGCGATTCCGGCGAGCCAGTCTAGTGCTTCCTGGCTTGCATAGGGGCTCTGGTTCTCGCTGTTGCCGCGGGTGTTGCTGTTGT |
| | TTGTGGGGTGTCCTGCACTGTCGCAGAACCATAGGATTTCGCTGCACTCGTCTAGCGTGTCTTGGTCGATAGCGAGATCGTCG |
| | AGGCTGACATTGTTGACGGTAAGGTTAACGTTGTCGAGGGAGATGGGTACACCGTACTGGTTTTCGACACTGTCAACAATGTT |
| | TTGTAGCTGTTGCATGTTGGTGGGCTGTAGTTGGACGATACGATGTATCGCTGTGTTGAGGGTGGTGTAGGTGATATTGTGTG |
| | TGTTGTTCATGGCTGTTGTCCCATCCCTGTGCTGTCGTCGTTGTCGTCTTGGTAGTATCGACTGTTTGCGTATCCTGTGAGGGT |
| | GATGAGTGTTTGGTCTGCCCACTGTTTCACGGTTTGCCGGGTGACTCCGAGACGTTGGGCTGCCACCGAATAGGTTTGGTCAT |
| | ACCCGTATACTTCCCTGAATGCTGCCAACCTAGCTAGCCGTATCCTTTGTTTGGGTGGCTGGCAGGTGAGGGTGTAGTCGTCG |
| | ATGGCTAGCTGCAAATCGATCATGGAGACGATGTTGTTGCCGTGGTGTTGGGGGGCGGTTGGTGGTGGTGGCATTCCTGGTTC |
| | GACGGAGGGTTTCCATGGGCCTCCGTTCCAGATCCATTGGGCGGCTTGGATGATGTCGGCGGTGGTGTAGGTTCGGGTCATGT |
| | GTCACCCCTGGAACAGGTTGTCGAGGTTGTCTGGCTGGCTGGTGGTGTCGAATCGTCCCACACAGTGGCAGTAGTCGTACATG |
| | AGTTTGATAATGTGTTGGTGGTCTCCCAAATAGGTGTTTCCGCTGATGCTGTAGGTGGCTGTGCCGTCTTTACTGATGGTGTAT |
| | TTGGCGGTGATGGTTTCGGGGGTTTCTGTGTTGGTGATGATGGCGGTGGTGGTGGCGCCTACTGTTTGTAGCCTGGTGGTTTG |
| | GGTGCCGTCGTCGAGGATGGTTGTGACCATTGTGGTTCTCCTTAGTTGCTGGTTTGGTTGTCGGCTATGGCTGTGATTTCTTGG |
| | ACGGGTTTGGGTAGGTATAGGTGGTGGAGTGTTTTGTTTGCTAGTCGTTGGGCGACACGGTAGCACATTTGGGTCCACTGGTT |
| | GCCTGTGAGTTGGTGGTATTGGTTGCGTACCGCAATATATAGTAGAGAGTCTTGGTACAGGTCGTCTGGGTTGACAGCCGGGT |
| | AGCGGCGGGCAATATTGGTGCAGGCTTTGTGTAGCTGGTGTTGGTGGGCTGGTGTGGTCCATCCCCAATCGGCTGTGGTTGCT |
| | AGGTCTGCTTTGGTTGGTCGTCTACTCATGGCATCTATTCTATCGGGCTATCTGGTAGTTGTTTGGTGTTTTGTTGTTGATAGT |
| | GTAGCACACGAGTCCGGGGTTGCCGGTGGCGCCTGTCCTGTGTCGGTACCAGACTGATTCTCCTTCCATGGATGGGCATTGGAT |
| | GAATGTGCGTTGTCCTTGCTCGGAGATTTCGAGGTGGTGCCTGTGTCCGGCCATGAGAATGTGGGATACGGTGCCGTTGTGGA |
| | ATTCTTGGCCGCGCCACCATTCGTAGAGTTGGTTGTTGCGCCATTGGTGTCAGTGGGCGTGCAGGATGGTAGCCCCGGCTACG |
| | TTGACGGTGGTGGTCATTTCGTCGCGTTGGGGGAAATAAAAGTGGAGGTTGGGGTAGTTGTTGGTGAGTTGGTAGGCTTCTGC |
| | GATGGCGCGGCAGCAGTCCACGTCGAATGAATCATCGTAGGTGGTGACGCCTTTGCCGAATCGTACGGCTTCTCCGTGGTTGC |
| | CGGGGATGGAGGTGACCGTAAGGTTGGTGCAGTGGTCGAACATGTGGATGAGTTGCATCATGGCCATGCGGGTGAGCCGGAT |
| | TTGTTCCGTCAAGGGGGTTTGTGTGCGCCAGGCGTTGTTGCCTCCTTGTGACACGTATCCTTCGATCATGTCGCCGAGGAAGG |
| | CTATGTGGACTCGTTGCGGCTGGCCTGCTTGCTGCCAGTAGTGTTTGGCGGCTGTGAGTGAGTGCAAATAGTCGTCGGCGAAT |
| | CGGCTGGTTTCTCCGCCGGGGATGCCTTTGCCGATTTGGAAGTCTCCTGCCCCGATGACGAAGGCCGCGGTGCTGTAGTCGGT |
| | GCGGGTGTCCTGTTCGGGTTTTGGGGGTGCCCATTCGGCTAGTTTATCGACGAGTTCGTCTACAGGGTAGGGGTCGGTTGCGG |
| | GTTGGTGGGCGATGATTTTTTGTATGGATCGGCCTGTTTCTCCGTTGGGTAGGGTCCATTCGGAGATGCGTGTGCGGCGTACG |
| | GTTCCGTTGGCGAGATCATCGCGGATGGTGTCTGCTTCGTTGTCGTGGTTGGCTAGCTGGGTGAGGAGCCGGTCTATGTTGTC |
| | TATCATCGGGTATTCTCTTCCTTTTGTGGAGTGGTGTTGGCTTGTTTGCGGCGGTAGTCTTTGATGACGGTGGCGGAGATGGG |
| | GTATCCGGCTTGGGTGAGTTGTTTTGCTAGCCAGGATGCGGGTATAGACCTGTCGGCGAGGACGTTTGCGGCTTTGCGGCCGT |
| | AGCGTTGGATCAACGTTTCAGTTTTGGTTGCCATGGTGTCCTATCGGTTGTGTGGTGGGCTGCCATCCTGTGCGGCAGTCTCCG |
| | TCGTGTCCTGGTTTGCGTGTGTACGATGTGATGGTGCCGTCTGTGTGGTGGAGTGTTTTGCCGCACATGACGTTTTGTAGATGC |
| | TCCGGCAGCTCGCTATTGCTATCGTCTTGCTCATCTAGCAAAGTTTTTTGTTGGGTGAAAAACTCGGACACGGTGCCGTTGTG |
| | GACTGGGAGTATCCATGTTTTCCATTGTTGTTGTAGTCGGGTGTTCCAGTGGAATTGTTTGGCGGCGTCTTCTGCCTGTTTTAT |
| | GGTTTTGTAGTAGCCGACGAGTATGCGCTGGTGTTGCTGGTCGGGCGGGTTTTGGCCTCGCCAGTATTGTGCCGCGACGGCGT |
| | ACCGGTTGTTGTCGGTGAAGGTGTTCCGGCAGTATTGGATGATGTTGTTGAGGGTGTCATCTGGCAGATCATCTGGGTTGAGG |
| | TTGGTGGCCTGGGTGAGGATGTCTCGGATGGTTTGAAGGTTGCGTTTTGTGGGTTTGAACGAGATGCTCACGATAGTGCCGGC |
| | TGTTCGTCTTGCATGAACTGGTTGAAGGTGTTGTTCCCGGCGTGTTGGGCTTGTGTGATTTGCTGGTCGGTCCAGTCGGGGTGT |
| | TGCTGTTTCAGATAGTGCCAGTGGCACGCATTGTAGGTCTCGTCTTGTAGCCGTGTGAGATGGTTTTCGGTGATGATTTGTTTC |
| | CACATGGCCCATGACACGTCGAGCCGGTTGAGGATTTCGAGGGCTGGGATGTTNAACTGGTCGAGGAAGAGGATTTCGTGGG |
| | TGTAGTAGTTTTTCTCGTAGGCGTCCCATCCGCTTCGGTGCCTGTTGGGCTGGTTTTTGGGGTAGGCTTCCCGGCATACTTTGT |
| | GTAAACGCTTGGCCATGTCGTCGGGTAGTTTAATGTCGGGGTTGGCGCGGATCATGGATCGCATCCCATCATAGGTGGTGCCC |
| | CAGGTGTGCATGATGTAGGTGGGGTCTTCACCATCAGCCCATTTTTCTGCACAGACGGCGAGGCGGATACGCCTCCTGACTGT |
| | TTGGCTGGTGTTGCGCCGGTTGGGGATGGGGCACGTGTCGGGGGGATCCATGATGTTTTAGTTTACCTTTCTGGTTTCGTGTTG |
| | TTGACGTGTTTTACTGTAGCACAGTGTCTAGTGCTTGTGTCAACCCTGTTTTTCCGGCCTGCAGGTAGGTGTCTGTGACATCCC |
| | CGACAGTGAGGGGCACATGTACGGCTTGGGGGAGTGCTGCCTGGATGGTTTGTGCCATCTGGTGGCCTGCGGGGTCTGGGTC |
| | GGACCAGATGTAGATGTGGTCATAGCCTTCAAAAAATTTGGTCCAAAAAGTTTGCCACGAGGTTGCGCCGGGTAGGGCAACG |
| | GCCGACCATCCGCATTGTTCGAGGATCATGGAGTCGAATTCGCCTTCGCAAATGTGCATTTCGGATGCCGGGTTGGCCATGGC |
| | GGCCATGTTGTAGATGGGGCCTGTGTCTCCTGCCGGGGTTAGGTATTTGGGGTGGTTGTGGGTTTTGCAGTCGTGCGGGAGTG |
| | AGCAGCGGAAACGCATTTTCTTATTTCTGCTGGGCCGCCCCAAACGGGATACATGTATGGGATGGTGATGCACTGGTTGTAGT |
| | TTTCGTGGCCGGGTATGGGGTCATTGTCGATGTATCCAAGGTGGTGGTAGCGGGCTGTTTCTTCGCTGATGCCTCTTGCTGAG |
| | AGCAGGTCGAGTATGTTTTCGAGGTGGGTTTCGTAGAGGGCCGGGGCTTTCTGGATTCGGCGGCGTTCCGCAATGTTGTATGG |
| | GTGTATGCTGTCGTACATTCGGGTTTCTTTCTTCGAGTTGTTGTTGTAGTTTGGCGAGTCCGCCTCCGACACCGCATGTGTGGC |
| | AGTACCAGACGCCCTTGTCGAGGTTGATGCTCATGGAGGGCTGGTGGTCGTCGTGGAACGGGCAGAGGATGTGTTGCTCGTT |
| | CTTGGATGGGTTGTACCGTATCCGGTAGGTGTCGAGGAGGCGGCAGGTGTCAGAGGTGTGGGAGGAGCTCGTTGAGGGTTGA |
| | TACCACATTGGCTTCCCTCCATGGCTTGTTGCGCTGTTTCATCACTACTAGTCCGATGGTGGATTGTGGCTGCCGGTTTCGGTG |
| | TGTTTCGTAGTTTCGTGCCTCTTGGCTGGCTTGTTTCACGAATTCGGCGAGATGGGGCTGCCCGGCTTTCGCTTCGATAACGTA |
| | GGTTTTGTTTCCGGTTTGAAGGATGAGGTCTCCTTCGTCTTCGCGGCCGTTGAGGTGGAGGCGTTCTATGTCGTGTCCGGTGTC |
| | GCGTAGCTGGTGCAATAATCGTGTTTCCCATTCTGCGCCTGCCCCGCGGTTGCGTGCCTGCTGTGAAGCCATCATAGTCCTTTG |
| | TGTGTTGTGGTCATGTTCCATGGCTGTTTTTCGACGAGGGGTCCGAAGAATGTGTATTCGGGGTAGGCTCGTAGCCGCTCGTA |
| | TCGGGTTCCGTCAGGACCGGATTTGCCGGTGCGCTGTTTGAGTACGGCGATGCGTGCCTCTGCCGGTATCGTGAGGCCGTTGC |
| | CATTATCCTCGCCACCATACAATGAGACTCCGAGGATGAGTTGTGGTTTTTCTGAGAGTCCGTTTTTGATTTCTCGCCGTGCTG |
| | GCGGGTGTTCGATGTCGGAGCCGGTTTTGTCGGTTGCATGGTGTGTGACGATGATGGTGGAGCCAGTATCCCTACCTAATGCT |
| | GTGATCCATTGCATGGCTTCTTGCTGGGCCTGGTAGTCGGATTCGCAGTCTTGAATGTCCATCAGGTTGTCGATAACAATGAG |
| | TGGTGGGAAAGTGTTCCACATTTCCATGTAGGCTTGCAGTTCCATGGTGATGTCTGTCCATGTGATGGGTGACTGGAATGAGA |
| | ATGTGATGTGTTGGCCGTGGTGGATGCTGTCTCGATAGTATTCTGGCCCGTAGTCGTCGATGTTTTGTTGTATCTGTGTGGTGG |
| | TGTGTTGGGTGTTGAGTGAGATGATTCGTGTGGAGGCCTCCCAGGGTGTCATGTCCCCTGATATGTAGAGGGCGGGCTGGTTG |
| | AGCATGGCGGTGATGAACATGGCTAGCCCGGATTTTTGGCTGCCGGACCGCCCCGCGATCATGACGAGATCCCCTTTGTGGA |
| | TGTGCATGTCCAGGTTGCGGTAGAGGGGTTCTAGTTGTGGTATGCGGGGCAGCTCGGCGGCTGTTTGGGAGGCTCTCTCGAA |
| | GGATCGTTGTAGAGAGAGCATCGGAGCCTTAATCTATCTGTCTATCGGTTGGATGATGTTTTGGTGGTCAGATGGAGTCGATG |
| | TCGATATCAGCATCTGTAGGGGCTGTGGTGTCGTCTAGCTGGCCGTTATCGCGCTTGTCTACGTATTCGGCAACCTTATCGTA |
| | GATGGCGTCGTCTAATGGTTTGAGCACGACCGCGTTGAACCCGTTTTTGGTGCGTACGGTGGCGAGTTTGAAGGCCTGTTCTT |
| | CTCCAAGGTAGGCTTCGAGGTCGCGGATCATGGAGTGTGGGCGGTCGTTGTTGCCGCGCGCTTTCTCAATAATAGCGTTGGGG |
| | ATGGTTTCTGGGGTGCCGTTGTTGAGATCGTCTAGGGTGTGGAAGATTGTGACATCAGCGTAGATGC |
| | SEQ ID NO.: 15; >4617 len: 12408 cycle: O |
| | GGGGGGGTTCCTGGCCTGGGGGGCCCTGTCGGTATTGTGATCGGCTTGTTTGCTGCCATGTTTGCCACTAACGCCCAGTTCCG |
| | TGCCGCGGTGATGCAGCTTGTGGGTGTGGTTGGTCAAGCCCTGGGGCAGATTATGGCGGCTATTCAGCCGCTGTTTGGTTTGG |
| | TTGCGGGGCTGGTGGCCCGGTTGGCGCCAGTGTTTGCCCAGATTATTGGTTTGGTTGCCGGTTTGGCTGCCCAGTTGATGCCT |
| | GTGATTGGTATGCTGGTTGCCCGGCTGGTGCCTGTGATCACGCAGATTATTGGTGCGGTGACGCAGGTAGCTGCCATGTTGTT |
| | GCCTGCGCTTATGCCGGTGTTGTAGGCTGTTGTGGCTGTGATACGTCAGGTTGTTGGCGTGGTTATGCAGTTGGTGCCGGTGT |
| | TGATGCCGGTGATTCAACAGATTTTGGGTGCTGTCATGTCTGTGCTGCCACCGGTTATTGGCCTGATCCGGTCGCTGATACCA |
| | GTCATCATGTCTGTTATGCGTGTGGTGGTGCAGGTTGTTGCGGTTGTGATACAGGTGGTGGCCCGTATTCTTGCGGTTGTGGCT |
| | CCGATGGTGGCTGCTGTGGTGGGGTTTGTTGCCCGTATTGTTGGTGCTGTTGTGTCGGCTGTGGCCCGTGTTATTGCTGCTGTT |
| | GCCCGTGTTGTTGGGTGGGTTGTGGCCCATTTTGTGTCTGGTTTGGCGCGTATGGGTTCGGTGGTTCAGGCTGGCTGGAATCG |
| | TATTAGGGCGTTTACGTCTGCGTTTATGAGCGGGTTTAAGTCGATCATTTCTGCCGGTGTGGGCGCTGTTGTCGGGTTTTTTGC |
| | GCGGCTTGGTTTGTCGGTTGCTTCCCATGTTCGGTCTGGGTTTGGCGCGGCTCGTGGTGCTGTTTCGGCTGCGATGAATGGGAT |
| | CCGGAGTATTGTGTCTTCGGTGGCGTCTGCTGTTGGCGGGTTTTTCAGTTCGATGGCGTCTAGGGTTCGTAGTGGTGCTGTGCG |
| | CGGGTTTAATGGTGCCCGGAGTGCGGCATCTTCTGCTATGCATGCTATGAGGTCCGCTGTTTCCAATGGTGTGCATGGTGTGC |
| | TAGGGTTTTTCCGGAATCTGCCCGGTAATATTAGGCGCGCTCTCGGTAATATGGGGTCCCTGTTGGTGTCTGCGGGCCGTGAA |
| | GTGGTTTCTGGTATGGGTAATGGTATCCGGAATGCTATGAGTGGCCTGTTGGATACGGTGCGTAATATGGGTTCTCAGGTTGC |
| | TAATGCGGCGAAGTCGGTGTTGGGTATTCATTCCCCGTCGAGGGTGTTTCGTGACCAGGTTGGCCGGCAGGTTGTTGCCGGTT |
| | TGGCTGAGGGGATCACCGGGAATGCCGGTTTGGCTTTGGATGCGATGTCGGGTGTGGCGGGTCGGCTGCCTGATGCGGTTGA |
| | TGCCCGGTTTGGTGTGCGATCGTCGGTGGGCTCGTTTACCCCGTATGGCAGGTATCAGCGTATGAGCGAGAAGAGTGTTGTGG |
| | TGAATGTGAATGGGCCTACTTATGGGGATCCTAACGAGTTTGCGAAGCGGATTGAGCGGCAGCAGCGTGACGCTTTGAATGC |
| | GTTGGCTTACGTGTGATTGCGGGGTGTGGTTCATGTTTATTCCTAACCCGTCTGATCGTGCCGGTTTGACGGTGGATTGGACG |
| | ATGTTTCCGTCGATTGGTAATAATCCGGAGCGTGTTCTTCATTTGACGGATTATACGGGTGCGTCTCCTGTCATGTTGTTGAAT |
| | GATTCGTTGCGCGGTTTGGGTGTTCCCGAGGTGGAGCATTTTTCTCAAACTCATGTTGGGGTGCACGGCTCGGAGTGGCGCGG |
| | GTTTAATGTGAAGCCTCGCGAGGTGACATTACCTGTGTTGGTGTCGGGTGTTGACCCGGATCCGGTGGGCGGGTTTCGTGACG |
| | GTTTTTTGAAAGCCTATGACGAGTTGTGGTCTGCTTTTCCTCCGGGCGAGCAGGGGGAGTTGTCGGTGAAGACTCCTGCCGGT |
| | GTTGAGCGTGTGTTGAAGTGCAGGTTTGATTCGGCTGATGACACGTTTACGGTGGATCTGGTGAATCGTGGCTATGCGCGTTA |
| | TGTGCTTCATTTGACAGCTTATGACCCGTTTTGGTATGGGGATGAGCAAAAGTTTCGTTTTAGTAACGCGAAGTTGCAGGATT |
| | GGCTGGGTGGCGGTCCTGTCGGCAAGAAGGGTACAGCGTTTCCTGTGGTGTTGACGCCTGGTGTGGGCTCTGGTTGGGATAA |
| | TCTGTCTAATAAGGGTGATGTGCCTGCGTGGCCTGTGATTCGTGTTGAGGGGCCTTTGGAGTCGTGGTCTGTGCAGATTGATG |
| | GTTTGCGTGTGTCTTCGGACTATCCTGTCGAGGAGTATGATTGGATCACTATTGATACGGATCCTCGCAAACAGTCTGCATTG |
| | TTGAACGGGTTTGAGGATGTGATGGATCGTTTGAAGGAGTGNGAGTTTGCCCCGATTCCGCCTGGCGGTTCTAAGAGTGTGA |
| | ATATTGAGATGGTTGGTTTGGGTGCCATTGTTGTGTCGGTGCAGTACAGGTTTTTGAGGGCTTGGTGAATAGTTGATGGCTGG |
| | TCTTGTTCCGCATGTAACATTGTTTACGCCGGATTATCGTCGTGTGGCGCCTATCAATTTTTTTGAGTCGTTGAAATTGTCGTT |
| | GAAGTGGAATGGTTTGTCGACGCTGGAGTTGGTTGTGTCGGGGGATCATTCAAGGCTTGAAGGGTTGACGAAGCCGGGTGCA |
| | CGGCTGGTTGTTGATTATGGTGATGGCCAGATTTTTTCTGAGCCTGTGCGTAAGGTGCACGGTGTGGGTCCTTGGCGTTCTTCG |
| | CGGGTGACTATCACGTGTGAGGATGATATCCGCCTGTTGTGGCGTATGCTGATGTGGCCTGTGAATTATCGTCCCGGTTTGGT |
| | GGGTTCGGAGTGGCGTGCCGACAGGGATTATGCCCACTATTCTGGTGCTGCGGAGTCGGTGGCTAAGCAGGTGTTGGGGGAT |
| | AATGCTTGGCGTTTTCCGCCTGGTTTGTTTATGACCGATGATGAGCGTCGTGGCCGCTATATTAAGGATTTTCAGGTGCGGTTT |
| | CACGTGTTTGCCGATAAACTGTTGCCGGTGTTGTCGTGGGCTCGGATGACTGTCACGGTGAAACAGTTTGAGAATGCGAAGTT |
| | TGATCAGCGTGGTTTGCTGTTTGATTGTGTGCCTGCGGTGACCCGGAAGCATGTGTTGACTGCCGAGTCGGGTTCGATTGTGT |
| | CGTGGGAGTATGTGCGTGACGCCCCGAAGGCGACATCTGTGGTTGTGGGTGGCCGCGGCGAGGGTAAGGATAGGCTGTTTTG |
| | TGAGGATGTTGATAGCTTGTCTGAGGGGGAGTGGTTTGATCGTGTCGAGGTGTTTAAGGATGCCCGTAACACGGATTCCGAG |
| | AAGGTGCATCTTATTGATGAGGCTGAGCAGGTGTTGTCCGAGTCTGGGGCCACGTCGGGGTTTAAGATCGAGTTGGCTGAGT |
| | CGGATGTGTTGCGGTTTGGGCCCGGCAATCTGATGCCAGGGGATTTGATCTATGTGGATGTGGGCTCGGGTCCTATTGCGGAG |
| | ATTGTTCGGCAGATTGATGTGGAGTGTGTATCGCCTGGTGATGGTTGGACGAAGGTGACTCCTGTGGCGGGGGATTATGAGG |
| | ATAATCCGTCGGCGTTGCTAGCACGGCGTGTTGCTGGTTTGGCTGCGGGTGTGCGGGATTTGCAAAAATTCTAAAAAGATTAG |
| | GGGTTTGTTGTGGGTATTGTGTGTAAAGGGTTTGATGGTGTGTTGACCGAGTATGATTGGGCTCAAGTGTCTGGTCTGATGGG |
| | TAATATGCCGTCTGTGAAGGGCCCGGACGATTTTCGTGTCGGCACGACGGTTCAGGGTGCCACAGTGTTGTGTAGTGTTTTGC |
| | CGGGGCAGGCGTGGGCTCACGGGGTGATGTGCACGTCGAATAGTGTTGAGACGGTGACGGGGCAGCTTCCGGGTCCGGGTG |
| | AGACCCGATACGACTATGTTGTCCTGTCTCGGGATTGGGAGCAGAACACAGCCAAGTTGGAGATTGTTCCCGGTGGCCGTGC |
| | GGAGCGTGCCCGTGACGTGTTGCGTGCCGAGCCTGGCGTGTATCATCAGCAGTTGCTAGCGACTTTGGTGGTGTCGTCTAACG |
| | GGTTGCAGCAGCAGTTGGATAGGCGAGCTGTGGCGGCTAGGGTTGCGTTTGGGGAGTCTGCTGCGTGTGATCCTACCCCTGT |
| | GGAGGGTGACCGTGTGATGGTTCCTTCTGGGGCTGTGTGGGCTAACCATGCCGGCGAGTGGATGCTACTGTCTCCGAGGATT |
| | GAGACGGGCACTAAGCAGATCCAGTTTGGTAGTTCGAATGTGTATGCTTACACGATCCCGTTTGATCGCCCGTTTAGTAGTCC |
| | GCCGGTTGTGGTGGCGTCTATGGCCACGGCTGCTGGGGGCACGCAGCAGATCGATGTGAAAGCCTACAATGTGACTGCCCAA |
| | AATTTTGGTTTGGCGTTTATTACGAATGATGGTTCGAAGCCGAATGGTGTGCCTGCGGTGGCTAACTGGATTGCTGTCGGCGT |
| | GTGACCGGGCTGTTGTTGAGGCGGATGTTGTGATATTGGGGGGCTGTGGTGTCGTGGTTTACTCCTGCACTGGTGGCCTCTAT |
| | CTGTACCGCATTGGCCACGGTTTTGGGTTCGGTTCAGGCTGCCACATCTAAATCTCGGAAGCGTTTGCGGCGGCTGTCGGCTC |
| | AGGTAGATGCGATGGAAGAGTATACGTGGGGTGTGCGCCGTGAGGTGCGAAGGTTTAACGCCGGGCTTCCTGATGATGTGGA |
| | GCCGATGCATCTCCCTGATGTGCCCGAGTTTTTGAAAGATACTGTTGATGGTGGAGGTGAGTAGGGTTGAGGGAGTTGGAGG |
| | AAGAGAAGCGGCAGCGCCGCAATTTTGAGAAGGCTTCACTGGTGTTGTTGTTTTTGTCGCTTGTACTGTTGGCGGTGGTTGCC |
| | GGGGGTGCTTTACGTTTCGGGGCTGTATCCTCTGAGCGGGATTCGGAGCAGGCTAAAGCCCAGTCTAATGGTACAGCCGCTA |
| | AAGGGTTGGCTGCCCGTGTGCGGCAGGTGTGTGCTTCTGGCGGGCAGGAGTCGGTGCGTCTTCACCGGTCTGGCTTGTGTGTG |
| | GATGCTCAGCGTGTTGAGCGTAGCGTGCAGGGTGTGCCGGGTCCTGCCGGTGAGCGCGGCCCGCAAGGGCCTGCAGGTGCTG |
| | ATGGGCGTGATGGTGTTAATGGTTCGGCTGGGCTGGTTGGCCCTGTTGGTCCGCAGGGTTCTCCTGGTTTGAATGGTGTGAAA |
| | GGTCCTGACGGGTTGCCTGGTGTGAATGGATCGGATGGCCATGATGGTGTTCCGGGCCGTGCAGGTGCTGATGGTGTGAACG |
| | GTGTTGACGGTTGGGATGGTTCGGCCGGTGAGCGCGGTGATGTGGGCCCTTCAGGTCCTGCCGGCCCGCAAGGTGCACAGGG |
| | TGAACGGGGTGAGCGCGGCCCCGCCGGTGCGAACGGATCCGATGGTAAAGATGGTAAGGATGGCCGTTCTGTTGTGTCTGTG |
| | TACTGTTCCGGGGGCCGCCTGTTTGTGAAATATAGTGACGGTGTGGCGTCCACGATATCGGGTTCGGTGGCCTGCGAGAGTGT |
| | GAAACCATCACCTGTGGTTACCGTGTCATCCCCGCAAGTGAGAGAGGAAGGGTGTTACTGATGTTGGTAGTGTTTGGTGGTG |
| | GTGTGTGGTGAGGTTTATTCCTGCGGCGCATCACTCGGCTGGTTCTAATAGTCCGGTGAATAGGGTTGTGATTCATGCGACGT |
| | GCCCGGATGTGGGTTTTCCGTCTGCCTCGCGTAAAGGGCGGGCGGTGTCGACGGCGAACTATTTCGCGTCCCCATCGTCTGGT |
| | GGTTCGGCGCATTATGTTTGCGATATTGGGGAGACGGTGCAGTGCTTGTCGGAGTCTACGATTGGGTGGCATGCCCCGCCGA |
| | ATCCGCATAGTTTAGGTATCGAGATTTGCGCGGATGGGGGTTCGCACGCCTCGTTTAGGGTGCCGGGGCACGCTTACACTCGG |
| | GAGCAGTGGCTTGATCCTCGCGTGTGGCCTGCGGTGGAGAAGGCTGTCATGCTGTGTAGACGTTTGTGTGACAAATATAATGT |
| | TCCGAAAAGGAAACTGTCGGCTGCCGATTTGAAGGCTGGCAGGCGTGGTGTTTGCGGGCATGTGGATGTGACGGATGCGTGG |
| | CATCAGTCGGATCATGACGATCCGGGGCCGTGGTTTCCGTGGGACAGGTTTATGGCCGTCGTGAACGGCGGCAGTGGAGAGA |
| | GTGAGGAGTTAACGGTGGCTGATGTGAAAGCCTTGCATGATCAGATTAAACAATTGTCTGCCCAGCTTACTGGTTCGGTGAA |
| | AAAGCTGCATCACGATGTTGGTGTGGTTCAGGTACAGAATGGTGATTTGGGTAAACGTGTTGATGCCCTGTCGTGGGTGAAG |
| | AATCCGGTGACGGGGAAGCTGTGGCGCACCAAGGATGCTTTGTGGAGTGTCTGGTATTACGTGCTGGAGTGTCGTAGCCGTA |
| | TTGACAGGCTTGAGTCGACTGTCAACGGTTTGAAAAAGTGGTGGTGGTTTGTTGTGGGTAAACAGTTTTGGTTGGGCTTGTTT |
| | GAGCGTGCACTGAAAACTTTTATTCAAACGTTTGTTGCTGTGTTGGGTGTGACGGCGGGTGTCACGTATACTGCGGAGTCGTT |
| | TCGCGGTTTGCCGTGGGAATCTGCCTTGATAACAGCAACGGTGGCTGCGGTGTTGTCGGTTGCTACCTCGTTTGGTAACCCGT |
| | CGTTTGTTGCCGGTAAACCGAAAACGACGCCTGTTGTGGATGCTGGGCTTGTTCCACCGGATGATCCTGGAATAGTGGAGTCT |
| | CACATGGTTGACGAAACGGATCCTGGCATGATAGAGCCTATCGACGATGCCGATGCTGGAGGCTATGTGCCGAGGCGTGCTG |
| | CTGAGTCGGAAGTTGGCACGGTAGAGTCTACTGTTGCATAAGTGAATATAGATGTGTGCCCCAGCGGTGCTGCCACGGTTGT |
| | GTGGTGGCTGCTGCTGGGGCACTCTTTTTGTGTCTATAGGGGTTTTACAGGTTGTTGTCTAGTGTGTCTTCGATGAGCTGGTCC |
| | AGGTGGAGGCAGGCTGAGATAGTATCGTTGGCCTGGTCTAGAACATCCTGGCCGATAACGCCTTTGTGGTTGTCGCGGTGGT |
| | AGAGGATGGACTGCATGATATCGTCGGCCTCCGCTTGCAGTAGTTTTGCCTGGTATGCGTTTCTGGCGAGCCAGTCTAGTGCT |
| | TCCTGGCTTGCATAGGGGTTCTGGTCCTCGCTGTTGTCACGGGTGTTGCCGTTGTTTGTGGGGTGTCCTGCACTGTCGCAGTCC |
| | CACAGGATTTCGCTGCACTCGTCTAGCGTGTCCTGGTCGATGTCGAGATCGTCGAGGCTGACTTCTTTGACGGTGAGGTTCAC |
| | ATCATCGAGGGAGATGGGTACATGGTACTGGTTTTCGATACCGGCAACAATGTTTTCCAACTGTTGCATGTTGGTGGGTTGTT |
| | GTTGGATGATTCGGTGTACTGCTGTTTTTAGGGCAGTGTAGGGGATATTGGTTGTGTTGTTCATGGTTTTATCCCATCCCTGTG |
| | CTGTCGTCGTTGCCGTCTGGATAGTATTTACTGTTTGCGTATCCTGTGAGGGTGATGAGTGTTTGGTCTGCCCACTGTTTCACG |
| | GTTTGTCTTGTCACACCCAATCGTTGGGCGGCCGACGCATATGTTTGGTCATACCCGTATACTTCCCGGAATGCTGCCAACCG |
| | TGCCAAATGTTTTCGCTGTATGGATGGCTGGCAGGTGAGGGTGTAGTCGTCGATGGCTAGCTGCAAATCGATCATGGAGACG |
| | ATGTTGTTGCCGTGGTGTTGGGGGGGGGTTGGTGGTGGTGGCATTCCTGGTTCGACGGAGGGTTTCCATGGGCCTCCGTTCCA |
| | GATCCATTGGGCGGCTTGGATGATGTCGGCGGTGGTGTAGGTTCGGTTCACTGGTCACCCCTGGAATAGGTTGTCGAGGTTGT |
| | CTGGGTTGCTGGTGTTGGTGGTGTCGAATCGTCCGACGCAGTGGCAGTAGTCGTACATGAGTTTGATGATGTGTTGGTGGTCT |
| | CCCAAATAGGTGTTTCCGCTGATGCTGTAGGTGGCTGTGCCGTCTTTGCTGATGGTGTATTTGGTGGTGATGGTTTCGGGTGTT |
| | TCGGTGTTGGTGATGATGGCTGTGGTGGTGGAGCCTACGGTTTGTAGCCTGGTGGTTTGGGTGCCGTCGTCGAGGATGGTTGT |
| | GACCATTGTGGTTCTCCTTAGTTGCTGGTTTGGTTGTCGGCTATGGCTGTGATTTCTTGGACGGGTTTGGGTAGGTCTAGGTGG |
| | TGGATTGTTTTGTTTGCTAGTCGTTGGGCGACACGGTAGCACATTTGGGTCCACTGGTTGCCTGTGAGTTGGTGGTATTGGTTG |
| | CGTACCGCAATATATAGTAGAGAGTCTTGGTACAGGTCGTCGGGGTTGACGGCCGGGTAGTGGCGAGCAATGTTGGTGCAAG |
| | CTTTGTGTAGCTGGTGTTGGTGGTGGTGGGTTGCCCACCCCCAGTTGGCGGTGGTGGCTTGTTGGACTTTGGTTGGTCGTCTAC |
| | TCATGGTTTTTATCTGGCTATCTGGTAGTTGTTTGGTGTTTTATGGTTGATAGTGTGGCACACGAGTCAGGGGTTGCCGGTGGT |
| | GCCTGTCTTGTGCCGGTACCAGACGGATTCTCCTTCCATGGATGGGCATTGTATGAATGTGCGTTGTCCTTGCTCGGATATTTC |
| | GAGGTGGTGCCTGTGTCCGGCCATGAGGATGTGGGATGTGGTGCCGTTGTGGAATTCTTGGCCGCGCCACCATTCGTACTGTT |
| | TGCCGGTTTTCCATTGGTGCCCGTGGGCGTGCAGGATTTGTGTGCCGGCCACATCAACGGTGGTGGTCATTTCGTCCCGGCTG |
| | GGGAAGTGGAAGTGAAGGTTGGGATATTGGTTGTTGAGCTGGTAGGCTTCTGCGATGGCCCGGCAGCAGTCCACGTCGAATG |
| | AATCATCGTAGGTGGTGACGCCTTTGCCGAATCGTACGGCTTCTCCGTGGTTGCCGGGGATGGATGTGATGGTCACGTTTTGG |
| | CAGTGGTCGAATTGGTGGATGAGTTGCATCATGGCCATGCGGGTGAGCCTGATTTGTTCCGTCAGGGGTGTTTGTGTGCGCCA |
| | GGCGTTGTTGCCTCCTTGTGACACGTATCCTTCGATCATGTCGCCTAGGAATGCGATGTGGACTCGTTGCGGTTTACCGGCTTG |
| | TTGCCAGTAGTGTTTTGCGGCTGTGAGGAAGTGTAGGTAGTCGTCGGCGAAGTGTGCTGTTTCCCCGCCGGGGATGCCTTTGC |
| | CGATTTGGAAGTCTCCCGCCCCGATGACGAAGGCCGCAGTGCCGTAGTCGGTGTGGGTGTCCTGTTCGGGTTTTGGTGGCTGC |
| | CATTCGGCTAGTTTATCGACGAGTTCGTCTACAGGGTAGGGGTTGGTTGCTGGTTGGTGGTCGATGATTTTTTGTATGGATCG |
| | GCCTGTTTCTCCGTTGGGTAGGGTCCATTCGGAGATGCGTGTGCGGCGTACGGTTCCGTTGGCGAGATCATCGCGGATGGTGT |
| | CTGCTTCGTTGTCGTGGTTGGCTAGCTGGGTGAGGAGCCGGTCTATGTTGTCTATCATCGGGTATCCTCTTCCTTTTGTGGAGT |
| | GGTGTTGGCTTGTTTGCGGCGGTAGTCTTTGATGACGGTGGCGGAGATGGGGTATCCTGCCTGGGTGAGCATTCGGGCTAGCT |
| | GTGTGGCGGGGACGGTTTTATCGGCGAGCACGTCGGCGGCTTTGTTGCCGTAGCGTTGGATGAGGGTTTCAGTTTTGGTTGCC |
| | ATGATGTCCTAGGGGTTGTGTGGTTGGTTGCCATCCTGTGCGGCAGTCGCCGTCGTGTCCTGGTTTGCGTGTGCACCATGTTGT |
| | GGTGCCGTCTGTGTGGTGGAGTGTTTTGCCGCACATGACTTCTTGGAGATGCTGTGGTAGCTGCTCCGGGTTGTTATCGTTTTG |
| | TGTGTCGAAGAGTGTTTTTTGTTTGGTGAAATGTTCGGAGACGGTTCCGTTGTGTACGGGTAGTATCCATGTTTTCCATTGTTG |
| | TTGTAGTCGGGTGTTCCAGTGGAATTGTTTGGCGGCGTTTTCTGCCTGTTTTATGGTTTTGTAGTAGCCGACGAGTATGCGCTG |
| | GTGTTGCTGGTCGGGCGGGTTTTGGCCTCGCCAGTATTGTGCCGCGACGGCGTACCGGTTGCTGGCTGTGAAGGCGTCCCAGC |
| | AGTATTCGATAATGTGCTGGAGCACATTATCGGGCATGTCTCGTACTTGGTTTTCGTCGAGCCACTCGTCGACAATAATGTTG |
| | CGTATGGCTTGCTTGTCTTTGGTGGTGGATTTGAACGAGATGCTCACGATAGTACCGGCTGGTCGTCTTGCATGAACTGGTTG |
| | AAGGTGTTGTTCCAGGCGTGTTGGGCTTGTGTGATTTGCTGGTCGGTCCAGTCGGGGTGTTGCTGTTTCAGATAATACCAGTG |
| | GCACGCATTGTAGGTTTCGTTTTGTAGCCGTGTGAGATGGTTTTCTTCGATGATTTGTTTCCACATGGTCCATGACACGTCGAG |
| | CCGGTTGAGGATTTCGAGGGCTGGGATGTTGAACTGGTCGAGGAACAGGATTTCGTGGGTGTAGTAGTTTTTCTCGTAGGCGT |
| | CCCATCCGCTTTGGTGCCTGTTGGGCTGGTTTTTGGGGTAGGCTTCCCGGCAGATTTTGTGTAAACGCTTGGCCATGTCGTCGG |
| | GTAGTTTAATGTCGGGGTTGGCGCGGATCATGGATCGCATCCCATCATAGGTGGTGCCCCAGGTGTGCATGATATGCAGTGG |
| | GTCTTCACCGTCTGCCCATTTTTCTGCACAGATGGCGAGGCGGATACGCCTCCTGACTGTTTGGCTGGTGTTGCGCCGGTTGG |
| | GGATGGGGCACGTGTCGAGGGGATCCATGATGTTTTAGTTTACCTTTCTTGTTTCGTGTTGTTGACGTGTTTTACTGTAGCACA |
| | GTGTCTAGTGCTTGTGTCAACCCTGTTTTTCCGGCCNGCNTGTAGGTGTCTGTGAAGGCACCGATAGTGAGGGGCACATGGGN |
| | GGNTTGNNGTNNCNCGGTTTGGNGGGTTTGGGNCATCTTGTCTCCCGCTTTGTCTGGGTCTGACCAGATGTAGATCCGGTCGT |
| | AGCCTTCGAAGAATTTGGTCCAGAAGGTTTGCCACGAGGTTGCGCCGGGTAGGGCGACGGCCGACCATCCGCATTGTTCGAG |
| | GATCATGGAGTCGAATTCGCCTTCGCAGATGTGTATTTCGGCTGCCGGGTTGGCCATGGCGGCCATGTTGTAGATGGAGCCTG |
| | TGTCTCCGGCCGGGGTCAAATATTTGGGGTGATTATGTCCCTTGCAATCATGCTGGAGTGAGCAGCGAAACCGGATTTTGCGT |
| | ACCTCGGCTGGGCCGTCCCATGTGGGGTACATGTAGGGGATGGTGATGCACTGGTTGTAGTTTTCGTGGCCTGGGATGGGGTC |
| | ATTGTCGATGTATCCAAGGTGGTGGTTGCGGGCTGTTTCTTCGCTGATGCCTCTTGCTGAGAGCAGGTCGAGTATGTTTTCGA |
| | GGTGGGTTTCGTAGAGGGCCGAGGCTTTCTGGATTCGGCGGCGTTCCGCAATGTTGTATGGGCGTATACTGTCGTACATTCGG |
| | GTTTTCTTCTTCTAATCGTTGTTGTAGCTTGGCAAGTCCGCCTCCGACACCGCATGTGTGGCAGTACCAGACGCCCTTGTCGAG |
| | GTTGATGCTCATGGAGGGCTGGTGGTCGTCGTGGAACGGGCAGAGGATGTGTTGCTCGTTCTTGGATGGGTTGTACCGCATCC |
| | GGTAGGTGTCGAGGAGGCGGCAGGTGTCAGAGGTGTGGGAGGAGCTCGTTGAGGGTTGATTCCACATAGGCTTCGCTCCATG |
| | GCTTGTTGCGCTGTTTCATCACTACGAGTCCGATGGTGGAATTGTTTTCTCGGTTTCGGTGGGTTTCGTAGTTGCGTGCCTCCC |
| | GGCTGGCTTGTTTCACGAATTCGGCAAGGTGTGCCTGTCCTGCTTTGGCTTCGATCACATAGGTTTTGTGGCTGGTTGTGAGG |
| | ATGAGGTCGCCTTCATCCTCTTTACCGTTGAGGTGGAGGCGTTCTATATCATGGCCGGTGTCGCGTAGTTGGTGGAGGAGTCG |
| | TGTTTCCCATTCGGCTCCGGCCCGGCGGTTGCGTGCCTGTTGTGTTGACATGATAGTCCTTTGTGGTGTTCGGTCATGTTCCAT |
| | GGCTGTTTTTCGGCGAGTGGCCCGAAGGATGTGTATTCGGGGTAGGCTCTGAGTCTTTCGTATCGGGTTCCGTCTGGGCTGGA |
| | TTTGCCTGTGCGCTGTTTGAGTACAGCGATGCGTGCCTCAGCGGGGATG |
| | SEQ ID NO.: 16; >4912 len:9543 cycle: O |
| | GGCTTAAGTGGCATCTGTCACACCCGACACTCCAGCATGAAACGCTCAATCCGGTTGAGCGCAGCCTTGACTCCCGGTTGCA |
| | ACCTACACACTCTAGAAACCACAACAACCAACCCAAACAGTTCAGAAGGGAGCACACTCGTGGATGGCACACTCGTCACACC |
| | ATCCTTCACCAGCCTCTACGGGCCCACAGACATCAACCCACTCCACCCCGCACACCTGGCAGGATGTGACATAGGCAACACC |
| | CACACGTCTATCATCTGCCGCCTGCACCGTGCCAAAGTCGAGGAAGCCATCCGACTCATCCGGCCCCTGTGGACTGTCACCCT |
| | CGACGGAGCCGTATACGGGCCACCCGACTGGCAGTCACTCACCGAAAACGAAGCCGAAGAGTTGCACGACATGATCGACAT |
| | GATCGACGTGGACGCCATCATCGCCGAAGCCACACACAACGAGCCTAGAATCGCCTAGAAATACTCGACCTATATAGTTGTA |
| | CCCCCAAGGGCTGAAAGTCGCTCTAATCCTCAGAGTACAAGCTTAAAACACGAAAGAAGGACCAATCATGCAATGGACATG |
| | CCACAAGTGCGATAGCACAATCATCGGATACCGACCAGAGCACTGCACAGTCTGCCACGAGACATTTAATGGCACTCATGCC |
| | GGGGACATGCACCGGACAGGCGATCACGGGGTCAAGGAAGGCCCCAGTCGCCGCAGGTGCCTCACTGTGGACGAGATGGAG |
| | GCTAAGGGATGGCTCGTAGCCGCCATGGATACTGGACGCAAGGTAGTGACATGTCACGCTTAAATGACAAAACCCCAAGCCA |
| | CACAGGAAACGCTCACACAAACTGAGCGACACCTTGACAGTGGTAGTACAGTCTGGAAATATTAACCATGTCAGCAACGAAC |
| | AACACCCCAGAAAGGGGAACACAGCCATGAACAAGAAAAAAGGCTACACCATCGCCGGAATCACAGCTGCCATCATCGCCG |
| | CATGCTCATTTATGCCAGCCCCAGACGACAATCCGCCACTCGCCTCACAGCCAGCCCCACAGGCCACCACAGCCAACACCGA |
| | ATGGACCCCCAAGACTACCCAACAGCGCAAAGCCGAGAAAGCGGCACGGCAGGCAGCCGCCACCCGCTCCATACAAGCCGA |
| | GCAGGCCAAAGCCCACAAGCAAGCCCAAGCAAGGGGGGAAGAAACCGCCACCGGACTCACCATGATCACGGCAGCACACA |
| | CCTGCAACCGCAAAGCCGAACAACAGGCCGCCGCACACGGTGTCAACTGGAACGGCAACCCCGACATCGACCTCCAACTCC |
| | ACAAAACCATCGGTAAAGACACATTCAGCATCGTCTACGGCGCAACCGCGAAACAGCCCGGCGCATCCAAACTACCCGTCAC |
| | CGTCCACTGCCTCGTCACCGGAACAGAAGACCACCAGCACGTCACCGACCTCAACATCAACCCGCAACAGTAACCCGCCAAG |
| | GAGCATCCCCGCTATGCCTCTCCTCTCCCACTACGCTGTCACCACCGGACTCGCCGACACGGCACACATTATTCACCACACCG |
| | GCGGCACACTACGCACAGCCACCGATATTGCCTCCCGCATCAACACCCTCAACCCAGACATTGATCTCGACCACGAAATCCG |
| | ACAACTGTTATCTATCGAAACCGACCTGTACAACATTTATAAAACCATCAACACCATTCTTCAGGAGCAAGCATGAACACAC |
| | CCAACAACAACATTGAGCTACACAGCTACGAAACGTTCTTCACCAGCCTCGCCTGGATCCAAGGCGGCATCATCACATGGAT |
| | GTACGCAACCGGCACCCCACACAAGGCAGCCCTCGCCATCATCGCCGCATGCGCCCTCGCCACCCTCCTGGGTGCCTCAACC |
| | CTCACCAACAATCCCCGAGACACCAAATGATCACAACACCCATCCTCATCGCTGAAACCCTCGCCATCATTATTCTCGCCGTA |
| | GCACTAGCCCACAACAACAACCAGTAACCCACACTTAAGGAGCACACACCCCATGGATGAGCCCACCCGCATGTACACCGAC |
| | CCCAACACCGGAGCCCGAAGAGAATTAAAACTCTGCAGGCTCTCACTCATCGACCCCGCAGCCTTGCACGCCCTAGGCGAAG |
| | TAGCCGGATACGGTGCTACTAAATACGGCGACAACAACTGGACCGGCGGCTATCCGTGGAGCCACAGCATTGACGCCCTCTA |
| | CAGGCACCTGCTATCATGGCAGCAAGGAAACAACCTCGATTATGAATCCGGGCTACCCCACCTGGCACACGCAGCCTGGCAC |
| | TGCCTCGCACTCCTCGCATACCAGCAACACAATGCCGGCCGAGACACCCGCAACCCATGGAACAAAAGCGACAAGTAATGCC |
| | TCTAGCACAATACCAGAAAACCATCAGCCATCCAGGCCACATCTCCTACAGTTCACTCACCCAGTGGGCCGAATGTGGAGAA |
| | AAATGGCGCCTATCCCACGGCTACCACACCCAACACCACACCTGGTACGCCACCATCGCCGGAAGCGCCATACACCACATCA |
| | CCGAACAATACGACCTACACCTGTACAACCCCACCGAATACTCTGCACTACCAGACAAACTCTCATCCTTCAAAAACATTTTC |
| | GACACCCAAGTCGCCCTCGCCGAATCCGAAGGCACAGAAATCAAACCCTCCGGCAGAATATGCAAAAACATGTGCGAGTCG |
| | GGCGGGCCACACAAGAAAGACTACGACTGGTGGATGGTTTACGGCCCCACCTTTGTGGACCGCTGGAAAACATGGAGGCGC |
| | AACCACCCAGGATACATCACCGCAATCCTGGACGGTAAACCAGGCATCGAATACCCGGTAGAAACCATCCTCGACGATGACA |
| | CAAAAATAGTCGGCTACATCGACCGCGTTTTCACCGACACCGACACCGGCGAAACCTTCATCCTCGACCTCAAAACCGGACG |
| | CCTACCCGCCGACAGTATGCAGCTGCACACATACCGATACATGCTCAACCAACACGGCAACGATGTGACAAAAGGCATGTTT |
| | TGGGCGCCAGCCACCGGCTGCAACGACGACAAGTCCCCAACACAAGGCACATCCACCGAACTCTACGACCTTGACAACAAC |
| | ACCTACCGGCATGTATCATCCATGTACAGTCAAGCAATGAAAGGAATCAGCGAAGGCATCTTCGTCCCACACGTCACAACAC |
| | TCTGTAAAGGCTGCCCCGTCAAGGACGCCTGCTGGGCTGTCAACGGGAAAGACGCCTACAGGTACCCTATAGAAACCACCAT |
| | CACAGCCCCAACAAAAGAAGACAAGGAGCACCAGTGACCGACAACACAGACGACGACCGATTCACCGTCACACTCAAATAC |
| | GGAGGCGACTACGCCGCCCCATGGACCGTCATCCGCGGAGACACCGCCGACCAGGTAAAGAAGGCTATCATCGACCTGCTA |
| | GGCGGACTCAAAAACAGCTCCGCGGCAAGGAACTGGGACCTGGCAACACTGATCGCCACAGCATCCATCATCCTCCAAGACC |
| | GATACAACCAGGCCGCCAAAGACTACGTAGACAACATCGCCTCAGAAGGAAACAACACCATCATCGACAAAATCAACAATG |
| | CAACAAGCAAAGCACAGCTAGCCGACCTCCTCAAACAGTACAAAAAGATCATCACCAGTAACAGGGACGTGTCTGAGGCTTT |
| | CCGCAGCAAACGCAACAGCCTCACCCGATAAAAACCGACACAAACCAACAAAACCAAACATAAACAGTAAAAGGAAAACA |
| | GTTATGGGACTCGCCAACTACCGAAACAACAGCAACAGCACCTTCTTCAACCCCTCCCGAAACCAGGACGCCACCGCCATCG |
| | CCTTCAAAATCCACGACGTCCAGCACAACACCGAAGGCTACGGCGGACAGACCGCAGACCGCATCTACGCCGATGTCACAAT |
| | CTTCCACACCCTAGACGATCTCAACAACGGCACCCCAGAAACCATCCCCAACGCCATTATCGAGAAAGCGCGCGGCAACAAC |
| | GACCGCCCACACTCCATGATCCGCGATCTAGAAGCCTATCTTGGCGAGGAGCAGGCCTTCAAACTCGCCACCGTACGCACCA |
| | AAAACGGCTTCAACGCGGTAATCCTCAAACCCCTTGATGACGCCATCTACGATAAGGTTGCCGAATACGTAGACAAGCGCGA |
| | TAACGGCCAGCTAGACGACACCACAGCCTCAACTGATGCTGATATCGATATCGACTCCATCTGACCACCAATACACATCCAA |
| | CCGATAGATAGATAAGGTCCCGATGCTCTCTCTCCAACGATCCTTCGAGAGAGCCTCCCAAACCGCAGCCGAGCTGCCCCGC |
| | ATACCCCAGCTAGAACCCCTCTACCGCAACCAGGACATGCACATCCACAAAGGGGATTTGGTCATGATCGCGGGGCGGTCCG |
| | GCAGCCAAAAATCAGGGCTAGCCATGTTCATCACAGCGATGCTCAACCAGCCAGCCCTCTACATATCAGGGGACATGACACC |
| | CTGGGAGGCCTCCACACGAATCATCTCACTCAACACCCAACACACCACCACACAGATACAACAAAACATCGACGACTACGGG |
| | CCAGAATACTATCGAGACAGTATCCACCACGGCCAACACATCACATTCTCATTCCAGTCACCCATCACATGGACAGACATCA |
| | CCATGGAATTGCAAGCCTACATGGAAATGTGGAACACCTTCCCACCACTCATTGTTATCGACAACCTGATGGACATCCAAGA |
| | CTGCGAGAGTGACTATCAGGCACNGCAAGAAGCNATGCAATGNANNACNNCATNAGNCAGGGATACTGGCTCCACCATCAT |
| | CGTCACCCACCACGCAACNGANAAAACCGGAACCGACATAGAACACCCGCCAGCTAGACGGGAAATCAAAAATGGCCTCTC |
| | CGAAAAACCACAACTCATCCTCGGGGTCTCATTGTATGGTGGCGAGGATAATGGCAACGGCCTCACGATACCGGCAGAGGCA |
| | CGCATCGCCGTACTCAAACAGCGCACCGGCAAATCCGGTCCTGACGGAACCCGATACGAACGACTCAGAGCCTATCCTGAAT |
| | ACACATTCTTCGGGCCCCTCGCCGAAAAACAGCCCTGGAACATGACCACAACACACAAAGGACTATCATGTCGACACAACAG |
| | TCACGCAACCGCCGGGCCGGCGCAGAATGGGAAACACGACTCCTCCACCAGCTCCGTCACATCGGCCATGATATAGAACGCC |
| | TCCACCTCAACGGTAAAGAGGACGAAGGCGACCTCATCCTCACCACCAGCCACAAAACCTATGTGATAGAAGCCAAAGCAG |
| | GACAGCAGCATCTAGCCCAATTCGTCAAACAAGCCAGCCGAGAAGCACGCAACTACGAAACACACCGAAACAAACAAAACA |
| | ATTCCACCATCGGACTCGTAGTGATGAAACAGCGCAACAAACCATGGAGCGAAGCCTATGTGGTATCAACCCTCAACGAGCT |
| | CCTCCCACACCTCTGACACCTGCCGCCTCCTCGACACCTACCGGATACGGTACAACCCATCCAAGAACGAGCAACACATCCTC |
| | TGCCCGTTCCACGACGACCACCAGCCCTCCATGAGCATCAACCTCGACAAGGGCGTCTGGTACTGCCACACATGCGGTGTCG |
| | GAGGCGGACTTGCCAAGCTACAACAACGATTAGAAGAAGAAAACCCGAATGTACGACAGTATACGCCCATACAACATTGCG |
| | GAACGCCGCCGAATCCAGAAAGCCTCGGCCCTCTACGAAACCCACCTCGAAAACATACTCGACCTGCTCTCAGCAAGAGGCA |
| | TCAGCGAAGAAACAGCCCGCTACCACCACCTTGGATACATCGACAATGACCCCATCCCAGGCCACGAAAACTACAACCAGTG |
| | CATCACCATCCCATACATGTACCCCGTCTGGGGGCGGCCAGCCGAAATACGAAAAATGCGTTTCCGCTGCTCACTCCCGCAC |
| | GACTGCAAAACCCACAACCACCCCAAATATTTAACCCCCGCCGGGGACACAGGCTCCATCTACAACATGGCCGCCATGGCCA |
| | ACCCGGCAGCCGAAATGCGCATTTGCGAAGGCGAATTCGACTCCATGATCCTCGAACAATGCGGATGGTCGGCCGTAGCCCT |
| | ACCCGGGGCCACCTCGTGGCAAACTTTCTGGACCAAATTCTTCGAAGGCTACGACCGCATCTACATCTGGTCCGACCCCGACA |
| | AAGCAGGCGACCAGATGGCCCAAACCCTCCAAACCGCACTCCCCCAAGCCATCCACGTGCCCCTCACTGTCGGAGATGTCAC |
| | AGACACCTACCTGCAGGCCGGCAAAACAGGGTTGACACAAGCCCTCAACACAGTGCTACAATAAAACCAGACAAACAACCC |
| | AAACCAAGAAAGGCATATAAAGCATCATGGATCCCCTCGACACCTGCCCCATCCCCGGCCGCCGCGACACCTCCAAGGCCGC |
| | CAGGAGACGCATCCGCCTCGCCATCTGTGCAGAAAAATGGGCCGACGGCGTGGACCCACTCCACATCATGCACACCTGGGGC |
| | ACCACCTATGATGGGATGCGATCCATGATCCGCGCCAACCCCGACATCAAACTACCCGACGACATGGCCAAACGTTTACACA |
| | AAAGCTGCCGGGATGCCTACCCCAAAAACCAGCCCAACAGGCACCGAAGCGGATGGGACGCCTACGAGAAAAACTACTACA |
| | CCCACGAAATCCTCTTCCTCGACCAGTTTAACATCCAGCCCTCGAAATCCTCAACCGGCTCGACGTGTCATGGACCATGTGGA |
| | AACAAATCATCGAAGAAAACCATCTCACATGGCTACAAAACGAAACCTACAATGCGTGCCACTGGTATTATCTGAAACAGCA |
| | ACACCCCGACTGCACCGACCAGCAAATCACACAAGCCCAACACGCCGGGAACAACACCTTCAACCAGTTCATGCAAGACGA |
| | ACAGCCGGCACTATCGTGAGCATCTCGTTCAAACCCACAAAACGCAACCTTCAAACCATCCGAGACATCCTCACCCAGGCCA |
| | CCAACCTCAACCCAGATGATCTGCCAGATGACACCCTCAACAACATCATCCAATACTGCTGGAACACCTTCACTGACAACAA |
| | CCGGTACGCCGTCGCGGCACAATACTGGCGAGGCCAAAACCCGCCCGACCAGCAACACCAGCGCATACTCGTCGGCTACTAC |
| | AAAACCATAAAACAGGCAGAAAACGCCGCCAAACAATTCCACTGGAACACCCGACTACAACAACAATGGAAAACATGGATA |
| | CTACCCGTACACAACGGAACCGTCTCCGAACATTTCACCAAACAAAAAACACTCTTCGACACACAAAACGATAACAACCCGG |
| | AGCAGCTACCACAGCATCTCCAAGAAGTCATGTGCCGCAAAACACTCCACCACACAGACGGCACCACAACATGGTGCACAC |
| | GCAAACCAGGACACGACGGCGACTGCCGCACAGGATGGCAGCCCACCACACAACCCCTAGGACATCATGGCAACCAAAACT |
| | GAAACGTTGATCCAACGCTACGGCCGCAAAGCCGCAAACGTCCTCGCCGACAGGTCTATACCCGCATCCTGGCTAGCAAAAC |
| | AACTCACCCAAGCCGGATACCCCATCTCCGCCACCGTCATCAAAGACTACCGCCGCAAACAAGCCAACACCACTCCACAAAA |
| | GGAAGAGGATACCCGATGATAGACAACATAGACCGGCTCCTCACCCAGCTAGCCAACCACGACAACGCCATCGACACTATC |
| | GACGACATTCTCGCCAATGGTACTGTACGCCGCACACGCATCTCCGAATGGACCTTACCGAACGGAGAAACAGGCCGATCAA |
| | TCCAAAAAATTATTGACCACCAACCCCCATCAGACCCCTACCCTATAGACTAACTCGTCGATAAACTAGCCGAATGGACACC |
| | CCCAAAACCAGCCGACAACACTCGCACCGACTACAGCACTGCAGCCTTCGTCATCGGGGCGGGAGACTTCCAAGTCGGCAAA |
| | GGCATCCCCGGAGGAGAAACATCACACTTCGCCGACGACTATTTGCACTCCCTCACCGCCGCAAAACACTACTGGCAACAGG |
| | CAGGCAAACCCGAACGAGTCCACATCGCCTTCCTCGGCGACATGATCGAAGGATACGTGTCACAAGGAGGCAACAACGCCT |
| | GGCGCACACAAACCCCCTTGACGGAACAAATCCGGCTCACACGCATGGACATGATGCAACTCATCCACATGTTCGACCACTG |
| | CACCAACCTTACGGTCACCTCCATCCCCGGCAACCACGGAGAAGCCGTACGATTCGGCAAAGGCGTCACCACCAACGATGAT |
| | TCAATCGACGTCGACTGCTGCCGCGCCATCGCAGATGCCTACCAACTCACCAACAACTACCCCAACCTCCACATTTATTTCCC |
| | CCAACGCGACGAAATGACCACCACCGTCAACGTAGCCGGGGCTACCATCCTGCACGCCCACGGACACCAATGGCGCAACAA |
| | CCGACACTACGAATGGTGGCGCGGCCAAGAATTCCACAACGGCACCGTATCCCACATTCTCATGGCCGGACACAGGCACCAC |
| | CTCGAAATATCCGAGCAAGGACAACGCACATTCATACAATGCCCATCCATGGAAGGAGAATCCGCCTGGTACCGGCACAAG |
| | ACAGGCACCACCGGCAACCCCGGACTCGTGTGCTACACTATCAACCATAAAACACCAAACAACTACCAGATAGCCAGATAA |
| | AAACCATGAGTAGACGACCAACCAAAGCAGACCTAGCCACCACCGCATCGTGGGGATGGGCAACCCCCCACCACCAGCGCC |
| | AGCTACACAAAGCCTGCACCAACACGGCACGCCACTACCCCGCAATCAGCGTAGACGACCTCTACCAAGACTCCCTACTATA |
| | TATTGCGGTGCGGGAACAATACCACAACCTAGACAACAAACACTACACCAAAATGTGCTACAGGGTAGCCAAACGGCTAGC |
| | CAACAAAACCATACAACACCTAGACCAGCCGAAACCTTTACCCGATATCATTCATCTAGCCGACAACCAAACCAGCAACTAA |
| | GGAGAATCATAATGGTCACCACCATCCTCGACGACGGCACCCAAACCACCAGGCTACAAACAGTAGGCGCCACCACCACCG |
| | CCATCATCACCAACACAGAAACCCCCGAAACCATCACCGCCAAATACACCATCAGTAAAGACGGCACAGCCACCTACAGCAT |
| | CAGCGGAAACACCTATTTGGGAGACCACCAACACATTATCAAACTCATGTACGACTACTGCCACTGCGTCGGACGATTCGAC |
| | GCCACCAGCCAGCCAGACAACCTCGACAACCTGTTCCAGGGGTGACACATGACCCGAACCTACACCACCGCCGACATCACCC |
| | AAGCCGCCCAATGGATCTGGAACGGAGGCCCATGGAAACCCTCCGTCGAACCAGGAATGCCACCACCACCAACCGCCCCCC |
| | AACACCACGGCAACAACATCGTCTCCATGATCGATTTGCAGCTAGCCATCGACGACTAC |
| | SEQ ID NO.: 17; >5146 len: 10856 cycle: O |
| | GTCTTAAACTTCAATATAATAACCTTTAAATCTTAAAGCTTATAGGTATAATAATATAATATAACTATATAAGTATTAAAGCT |
| | TATAAGTTATAAAAGTTTTAGAAGAGCTAAGAGGTTAACTTCTTTACTTCTCTTCTCTCTTTGGTTCTTTCTCTCTTCTCTTCT |
| | TTTCTTCATCAGGGGAGAAGAGGAACCTTTACCATCAGCGCCGATGACCTTTGCCGTGTGTCTCGTGTACCACCGGTCGCACGC |
| | TCCCGGTTTGCACACTCCCCACACTCTGACACCCGTGTCCCTTTCAGGCTTAGCGTGTTCGGCTGAAGGCGTACGGCGTGTCA |
| | CGCTTAAACCCTTAACACCAGGTAAGACTTAAAGTGTATATTATAAGTAGAAGACTTTAAAACCTTAAGGTGTTCCCGCTTAG |
| | CCTGTGTCCTTTAACGCCAGGCGTCAAGCACTAAGCTGTGAAACGCGAACACCCATCCACCCCCATTTTTCTTTCGTGTCCTTC |
| | TCTTTTTGACACAGCTGGGGGGCGATGTGATCTTTCTCACAGGCCAGGGGGTAGTGGAGAAAACAAACACCCCCTCAAACGA |
| | ACAAAACAGCCCCCAGAATCGAATGACAGGGCAAGGGCAAGGTATTCATACCCCCAGACGATTCCAGGCCGTTACAAGAGC |
| | AAACAAGACCCGTACAGGGCTAGGCGAGGATCGGGGACGTGATGGCACACACCAACCGCACCGCATCATCCGCACACCGAC |
| | GCTGGCGGCAACGACTCATCACCCAAGCCCGACAGCAAGGCCAAACCGAATGCCCACTCTGCGGAGCCCAGATAGCCTGGG |
| | GCACACACGACCTACCAACCAGCCCCGAAGCCGACCACATCACACCCGTCAGCCTCGGGGGACTCAACCCCCTCGACAACGG |
| | GCAAATCATCTGCAGAACATGCAACAGAAGCAAAGGCAATCGCAGTGATCCAAACATTAGTTTCCAACAACAAACCACAAA |
| | AACGTTGATTCCATGGTGAAAAACCCGCCAACCCCCACCGGGGACACCCCCTGCACACCCGTGCAAAACCTCGTACGGCTTA |
| | GTGAAATACCTCCCTTTTGTGGATTTGCCTGTTTGTCGACTTTTTGTGTTGGTGGTGAGTGTTGTGCAGCCTGAGCTTCCTGAT |
| | AGTCGTGAGTGGTGAGGGGAGACGCGTCGTTGGTGGTGTGTGTGGGGTGAGGATAGTCGCGCGCAGTACGTGTCTGATGAGG |
| | AGTGGCTGTTTCTCATGGATGCTGCGGTGATTCATGATGTGGTGTGGCGTGAGGGTCGCGCTGATTTGGTGGCTTCGCTTCGT |
| | GCTCATGCGAAGGCGTTTATGGGCATGTTGGATCGTTATTCGGTTGATGTGGTGTCTGGTGGCCGTGGTGGGGGTTCTGCGGT |
| | GGCGATGATTGACCGGTATCGGAAGCGTAAAGGGGCCTAATGTCGAGCGTTGTTGGTTCTCAGGTTCCTCGTCACCGGGTGG |
| | CTGCGGCGTATTCGGTGTCTGCTGGCGGTGATGCTTGGGAGTTGGGTCGTGCGTATGGGTTGACGCCTGATCCGTGGCAGCAG |
| | CAGGTGTTGGATGATTGGCTGGCTGTCGGTAGCAATGGCAGGCTTGCTTCGGGTGTGTGTGGGGTGTTTGTGCCTCGCCAGAA |
| | TGGCAAGAATGCTATTTTGGAGGTTGTGGAGTTGTTTAAGGCGACTATTCAGGGTCGCCGTATTTTGCATACGGCTCACGAGT |
| | TGAAGTCGGCTCGTAAGGCGTTTATGCGGTTGAGGTCGTTTTTTGAGAATGAGCGGCAGTTTCCTGACTTGTATCGTATGGTG |
| | AAGTCGATTCGTGCAACGAATGGCCAGGAGGCTATTGTGTTGCATCATCCGGATTGTGCCACGTTTGAGCGTAAGTGTGGTTG |
| | CCCGGGTTGGGGTTCGGTGGAGTTTGTGGCTCGTAGCCGTGGTTCTGCTCGCGGGTTTACGGTTGATGATTTGGTGTGTGATG |
| | AGGCGCAGGAGTTGTCGGATGAGCAGTTGGAGGCGTTGCTTCCTACCGTGAGCGCTGCCCCGTCTGGTGATCCGCAGCAGAT |
| | TTTTTTGGGTACGCCTCCTGGGCCGTTGGCTGACGGTAGCGTGGTGTTGCGTCTTCGTGGGCAGGCTTTGTCGGGTGGTAAAA |
| | GGTTTGCGTGGACGGAGTTTTCGATTCCTGACGAGTCTGATCCGGATGATGTGTCGCGGCAGTGGCGGAAGTTGGCGGGGGA |
| | TACGAATCCGGCGTTGGGTCGCCGCCTGAATTTCGGGACCGTGTCGGATGAGCATGAGTCGATGTCTGCTGCCGGGTTTGCTC |
| | GGGAGCGGCTTGGCTGGTGGGATCGTGGCCAGTCTGCTGCGTCTGTGATTCCGGCGGATAAGTGGTCCCAGTCTGCGGTGGA |
| | TGAGGCTAGTTTGGTTGGCGGCAAGGTGTTTGGTGTCTCGTTTTCTCGTTCGGGGGATCGTGTCGCGTTGGCGGGTGCTGGTC |
| | GGACTGATGCTGGGGTTCATGTTGAGGTGATTGATGGGCTGTCGGGGACGATTGTTGATGGTGTGGGCCGGTTGGCTGATTG |
| | GTTGGCGGTTCGTTGGGGTGATACTGACCGGATCATGGTTGCCGGGTCTGGTGCGGTGTTGTTGCAGAAGGCGTTGACGGATC |
| | GTGGTGTTCCGGGCCGTGGCGTGGTGGTTGCCGATACTGGGGTGTATGTGGAGGCGTGTCAGGCGTTTTTGGAGGGTGTCAG |
| | GTCGGGTGTGATCAGTCATCCTCGTGCTGATTCTCGCCGTGACATGTTGGATATTGCTGTGAGGTCGGCTGTGCAGAAGAAGA |
| | AAGGCTCTGCGTGGGGTTGGGGTTCCTCGTTTAAGGATGGTTCTGAGGTTCCTTTGGAGGCTGTGTCTTTGGCGTTTATGGGG |
| | GCTAAACAGGCTAGGCGTGGCCGTCGTGATCGTGGTGGTAGGAAGCGGGTGTCTGTGGTATGAACTCGGATGAGTTGGCTTG |
| | GATTGAGGGCATGTTTGATCGGATTCAAAGGTTGTCTTCGTGGCATTGCCGTATTGAGGGCTACTATGAGGGTTCGAATCGGG |
| | TGCGTGATTTGGGGGTGGCCATTCCTCCGGAGTTGCAGCGTGTGCAGACTGTGGTGTCGTGGCCTGGTATAGCCGTGGATGCT |
| | TTGGAGGAGCGTCTGGATTGGCTTGGCTGGACTAACGGTGACGGCTACGGCCTGGATGGTGTGTATGCGGCGAATCGGCTTG |
| | CTACGGCGTCGTGTGATGTGCATTTGGATGCGCTGATTTTTGGGTTGTCGTTTGTGGCTGTTATTCCCCAAGGCGATGGGTCGG |
| | TGTTGGTTCGTCCGCAGTCACCCAAGAACTGTACAGGCCGGTTTTCGGCTGACGGGTCTCGTCTGGATGCTGGCCTTGTGGTG |
| | CAGCAGACGTGTGATCCTGAGGTTGTTGAGGCGGAGTTGTTGTTGCCTGATGTGTTTGTTCAGGTGGAGCGGCGAGGTAGCC |
| | GTGAGTGGGTTGAGGTGGATCGTATACCGAATGTGCTTGGGGCGGTTCCGTTGGTGCCGATTGTGAATCGGCGTAGGACGTC |
| | GCGTATTGATGGGCGTTCGGAGATTACGAGGTCTATTAGGGCTTACACGGATGGGGCTGTTCGCACACTGTTGGGGCAGTCT |
| | GTGAATCGTGACTTCTATGCGTATCCTCAGCGTTGGGTGACGGGTGTTTCGGCTGACGAGTTTTCGCAGCCTGGCTGGGTGTT |
| | GTCTATGGCTTCTGTGTGGGCTGTGGATAAGGATGATGATGGGGACACTCCGAATGTGGGGTCGTTTCCGGTTAATTCTCCGA |
| | CTCCGTATTCGGATCAGATGCGCTTGTTGGCGCAGTTGACTGCGGGTGAGGCTGCTGTTCAGGAGCGCTATTTCGGGTTTATT |
| | ACGTCTAATCCGCCTTCGGGTGAGGCTTTGGCTGCTGAGGAGTCGCGGCTTGTGAAGCGGGCTGAGCGGCGTCAGACGTCGT |
| | TTGGTCAGGGCTGGCTGTCGGTTGGTTTCCTGGCTGCCAAGTCGCTTGATTCTTCCGTTAACGAAGCTGATTTTTTTGGTGATG |
| | TTGGTTTGCGGTGGCGTGATGCATCAACACCTACTCGGGCGGCTACAGCGGACGCTGTGACGAAGCTTGTTGGTGCCGGTATT |
| | CTTCCTGCGGATTCTCGGACGGTGTTGGAGATGTTGGGTTTGGATGATGTGCAGGTTGAGGCTGTGATGCGTCATCGTGCCGA |
| | ATCTTCGGATCCGTTGGCTGCGCTTGCTGGGGCTATATCGCGTCAGACGAACGAGGTTTGATAGGCGATGGCTTCGGGGGTTG |
| | AGGCGAGGCTTGCTGCTGCCGGGTATCAGCGTGAGGCGATTCGTTTTGCCGGGAAGTATGCGGGCTATTATGCTGAGCTTGGT |
| | CGTTTGTGGCATTCCGGGAAGATGACAGATGCGCAGTATGTGCGTTTGTGTGTGGAGTTGGAGCGTGCCGGCCATGATGGTTC |
| | GGCATCGTTGGCTGCCAGGTTTGTGTCGGATTTTCGCCGGTTGAATGGTGTGGATCCTGGTTTGATTGTGTATGACTAGTTTGA |
| | TGCTGCGGCGGCTTTGGCTAGGTCGTTTTCGACTATGAAGACTCTTGAGAGTGACCCGGATAGGGTGAATGATACGATTGATG |
| | TGATGGCTGCGGGTGTTGATCGGGCTGTTATGAATGCTGACCGTGACACGGTTGAGTGGTCTGCTGGTGCGCAGGGTAGGTC |
| | GTGGCGTCGGGTGACGGATGGTGATCCGTGTGCTTTTTGTGCCATGTTGGCTACGAGGTCGGATTATACGACTAAGGAAAGG |
| | GCGCTCACGACTGGTCATACTCGGCGTCATAAGCGTGGCGGTAAGCGTCCGCTGGGTTCGAGGTATCATGATCATTGTGGGT |
| | GTACGGTGGTTGAGGTTGTTGGGCGTTGGGAGCCCTCCTCTGCGGACACCGCATATCAGCGGGTTTATGAGAAGGCTCGTGA |
| | GTGGGTTGATGATCATGGGTTGCAGCAGTCGCCTGGCAATATTTTGAAGGCTATGCGTACTGTTGGCGACATGAGATGATGGT |
| | TTCCGGTTGTGTGCCGCCGGTTATCGGTGCGCAGGGTTGTCTCCCGCACGGGGGTCAACAATGTTGTGTTGTTTTCCGCAAGG |
| | AGTGTAGGTTAGGCTATGGCCGATCAGAGTGTTGAGGAACAGAATGTTGACAATGATGCTGTGGAGCCCGGAAAGGGTGAC |
| | GGCATTGTTGACACGGTGAAGGGCGATCAAGGCAAACAGGTTGAAGATCAGTCGAAGAGTGAAGGCGAGGGTAAATCGTCT |
| | GGGACTGATTGGAAGGCGGAGGCCCGTAAGTGGGAGTCTCGTGCTAAAAGTAATTTCGCCGAGTTGGAGAAGCTTCGCGCCT |
| | CGGATGGTGATGCGGGGTCTGTGATTGATGATCTTCGCCGCAAGAATGAGGAACTCGAAGACCGGATCAATGGGTTTGTTCT |
| | TGAGGGTGTGAAGCGTGCTGTTGCGGCCGAGTGTGGCTTGTCGGGTGATGCGGTCGCTTTCTTGCACGGTAGCGACCGTGAA |
| | GCGCTGGTGGAGTCTGCTAAGGCTTTGAAGGGTTTGATCGACCATAGTAGTGGTGGCGCGGGTGTGCGCCGGCTTGCGGGGA |
| | GTGCCCCCGTTGATGATGTTAAACGACGTGAGGGTGTCGCGTTTGTGGATGCTCTTGTCAATAATTCTAGGAGATGATTTGTG |
| | ATGGCTGACGATTTTCTTTCTGCAGGGAAGCTTGAGCTTCCTGGTTCTATGATTGGTGCGGTTCGTGACCGTGCTATCGATTCT |
| | GGCGTTTTGGCGAAGCTTTCGCCGGAGCAGCCGACTATTTTTGGCCCTGTTAAGGGTGCCGTGTTTTCGGGTGTTCCTCGCGC |
| | CAAGATTGTTGGTGAGGGTGAGGTTAAGCCTTCCGCTAGTGTTGATGTTTCGGCGTTTACTGCGCAGCCTATTAAGGTTGTGA |
| | CTCAGCAGCGTGTCTCGGACGAGTTTATGTGGGCTGATGCTGATTACCGTCTGGGTGTGCTTCAGGATCTGATTTCCCCGGCT |
| | CTTGGTGCTTCGATTGGTCGCGCTGTGGATCTGATTGCTTTCCACGGTATTGATCCTGCCACTGGGGAGCCTGCTGCGGCTGTC |
| | AAGGTGTCGCTGGATAAGACGAAGAAGACGGTTGATGCCACGGATTCTGCTACGACCGATCTTGTTAAGGCTGTCGGTCTTA |
| | TCGCTGGGGCCGGTTTGCAGATTCCTAACGGTGTTGCTTTGGATCCGGCGTTCTCGTTTGCCCTGTCTACTGAGGTGTATCCGA |
| | AGGGGTCTCCGCTTGCCGGCCAGCCTATGTATCCTGCAGCTGGGTTTGCTGGTTTGGATAATTGGCGCGGCTTTAATGTTGGT |
| | GCTTCTTCGACTGTTTCGGGTGCCCCGGAGATGTCGCCTGCCTCTGGTGTTAAGGCGATTGTTGGTGATTTCTCTCGTGTTCAT |
| | TGGGGTTTCCAGCGTAACTTCCCGATCGAGCTCATCGAGTATGGTGACCCGGATCAGACTGGGCGTGACCTGAAGGGCCATA |
| | ATGAGGTTATGGTTCGTGCCGAGGCTGTGCTGTATGTTGCGATTGAGTCGCTTGATTCGTTTGCCGTGGTGAAGGAGAAGGCT |
| | GCCCCGAAGCCTAATCCTCCGGCTGGTAACTGATTCATTTGTTGCGATAATGTTTATGCTGTGTGCAGGGGGTGGTGTTGATG |
| | GGTATCATTTGGAAGCCTGAGGATATTGAGCCTTTCGCCGATATTCCTAGAGAGAAGCTTGAGGCGATGATCGCCGATGTGG |
| | AGGCTGTGGCTATCAGTGTCGCCCCCTGTATCGCTAAACCGGATTTCAAATACAAGGATGCCGCTAAGGCTATTCTGCGCAGG |
| | GCTTTGTTGCGCTGGAATGATACTGGCGTGTCGGGCAGGTGCAGTATGAGTCTGCGGGTCCTTTCGCTCAGACTACACGGTCT |
| | AATACTCCCACGAATTTGTTGTGGCCTTCTGAGATTGCTGCGTTGAAGAAGTTGTGTGAGGGTGATGGTGGGGCTGGTAAAGC |
| | GTTCACTATTACACCGACCATGAGGAGTAGTGTGAATCACTCTGAGGTGTGTTCCACGGTGTGGGGTGAGGGTTGCTCGTGCG |
| | GGTCGAATATTAACGGCTACGCTGGCCCTTTGTGGGAGATATGATATGACCAGTTTTCCTTATGGTGAAACGGTTGTGATGAT |
| | TCAACCGACTGTTCGTGTCGATGATCTTGGCGACAAGGTTGAAGACTGGTCTAAGCCTGTCGAGACTGTGTACCATAATGTGG |
| | CCATCTATGCTTCCGTTTCGCAGGAGGATGAGGCGGCAGGCCGTGACTCGGATTATGAGCATTGGTCGATGCTTTTCAAGTCC |
| | CCTGTTGTGGGCGCTGATTATCGTTGCCGGTGGCGTATTCGGGGTGTTGTGTGAGAGGCTGACGGGTCTCCTATCGTGTGGCA |
| | TCATCCAATGTCTGGCTGGGATGCGGGCACGCAGATCAATGTGAAGCGTAAGAAGGGCTGATCGGTTGTGGCTCAGGATGTG |
| | AATGTGAAGCTGAACTTGTCGGGTATTCGTGAGGTGTTGAAGTCTCCTGGTGTGCAGGGCATGTTGGCTGAGCGTGGCGAGC |
| | GGGTTAGGCGTGCCGCATCGGCGAATGTGGGCGGTAATGCTTACGATAGGGCCCAGTATCGTGCCGGGTTATCATCGGAGGT |
| | GCAGGTTCACCGTGTTGAGGCTGTCGCTCGTATAGGCACCACATATAAGGGTGGGAAGCGTATTGAGGCGAAGCATGGCACG |
| | TTGGCGAGGTCGATTGGGGCTGCGTCGTGATCGTTTACGGTGATCCGCGTGTGTGGGCTAAACGCGTGCTCAAGGATGATGG |
| | CTGGCTGTCTGGGATACCGTGTACAGGGACGGTGCCTGAGGATTTCAGCGGTGACCTGGTCTGGTTGGCGTTGGATGGTGGTC |
| | CGCAGTTGCATGTTCGTGAGCAGGTGTTTTTGCGGGTGAACGTGTTTTCGGATACTCCGGATAGGGCTATGTCTTTGTCGCGT |
| | CGTGTTGAGGCTGTCCTTGTTGACGGGGTTGATGGTGGCCCGGTGGTGTACTGCAAACGGTCTACTGGCCCTGATTTGCTGGT |
| | TGATGGTGCACGTTTTGATGTGTATTCGCTTTTTGAGCTGATATGCAGGCCTGTCGAATCTGAGTAAACGTATTTGTTTTTGTT |
| | TTAATGTAATTGTTTGATATTTAATGGGGGTTGTGATGGCTGCAACACGTAAAGCGTCCAATGTTCGCTCTGCTGTTACTGGC |
| | GACGTTTATATTGGTGACGCGCACGCCGGTGACACTATTGATGGTGTTGGGAAGATTCCTGACGGTCTTACCGCTTTAGGGTA |
| | TCTGTCGGATGATGGGTTTAAGATTAAGCCGGAGCGTAAAACGGATGATTTGAAGGCGTGGCAGAATGCGGATGTTGTTCGC |
| | ACTGTTGCCACCGAGTCGTCTATCGAGAATTCTTTCCAGCTGATCGAGTCTAAGAAGGAGGTTATCGAGCTGTTTTGGCAGTC |
| | GAAGGTTACTGCCGGAGCCGATTCGGGTTCGTTCGATATTTCTCCTGGCGCCACCACCGGGGTTCATGCCCTGTTGATGGATA |
| | TTGTTGATGGCGATCAGGTTATTCGCTACTATTTCCCTGAGGTTGAGCTCATTGATCGTGACGAGATTAAGGGTAAGAATGGC |
| | GAAGTGTACGGGTATGGTGTGACGTTGAGGGCGTATCCTGCCCAGATTAATCATAAGGGTGATGCGGTGTCGGTTCGGGGGT |
| | GGATGACGGCTTTAAAAGCTGATACTCCTCCGACGCCTCCTCCTTCGCCGAAGCCGGATCCTAATCCGCCGTCTGAGAACTGA |
| | TACACGATTTTAGGGATTGTTGATAGATGAGTGACACTGGTTACACGTTGAAGATTGGTGACCGTAGCTGGGTGTTGGCGGAT |
| | GCGGAGGAGACGGCTCAGGCTGTTCCTGCCCGCGTGTTCCGTCGTGCCGCCAGGATTGCCCAGTCGGGGGAGTCTGCGGATT |
| | TCGCCCAGGTTGAGGTGATGTTTTCTATGTTGGAGGCTGCCGCCCCGGCTGACGCGGTGGAGGCCCTGGAGGGGCTTCCTATG |
| | GTTCGTGTTGCCGAGATTTTCCGTCAATGGATGGAATACAAGCCTGATGGTAAGGGTGCCTCGCTGGGGGAATAGTTTGGCTC |
| | CACGGCCTGATTGATGATTATCGTGGGGCCATCGAATACGATTTTCGCACTAAATTTGGTGTTTCTGTTTATAGTGTTGGTGGC |
| | CCGCAGATGTGTTGGGGTGAGGCTGTCCGGCTGGCTGGCGTGTTGTGTACCGATACGTCGAGCCAGTTGGCGGCCCACCTGA |
| | ATGGTTGGCAGCGCCCGTTTGAGTGGTGCGAGTGGGCTGTGCTGGACATGCTGGATCATTACAGGTCTGCTAATAGTGAGGG |
| | GCAGCCGGAGCCTGTGGCGAGGCCTACGGATGAACGTAGGGCCCGGTTTACGTCTGGGCAGGTGGACGATATTTTGGCGCGT |
| | GTTCGTGCCGGTGGCGGGGTGTCTCGCGAGATTAATATTATGGGGTGAATAGTGTATGTCTGGTGAGATTGCTTCCGCATATG |
| | TGTCGTTGTATACGAAGATGCCGGGTTTGAAGTCTGATGTTGGTAAACAGTTGTCGGGTGTGATGCCTGCTGAGGGTCAGCGT |
| | TCGGGTAGCCTGTTTGCTAAGGGTATGAAGTTGGCTTTGGGTGGCGCCGCAATGGTGGGTGCCATCAACGTGGCTAAGAAGG |
| | GTCTCAAGTCTATCTATGATGTGACTATTGGTGGCGGTATTGCTAGGGCGATGGCTATTGATGAGGCTCAGGCTAAACTGACT |
| | GGTTTGGGTCACACGTCGTCTGCCACGTCGTCGATTATGAATTCGGCTATTGAGGCTGTGACGGGTACGTCGTATGCGTTGGG |
| | TGATGCGGCTTCTACTGCGGCGGCGTTGTCTGCTTCGGGTGTGAAGTCTGGCGGGCAGATGACGGATGTGTTGAAGACTGTCG |
| | CGGATGTGTCTTATATTTCGGGTAAGTCGTTTCAGGATACGGGCGCTATTTTTACGTCTGTTATGGCTCGCGGTAAGTTGCAG |
| | GGCGATGACATGTTGCAGCTTACTATGGCGGGTGTTCCTGTGCTGTCTTTGCTTGCCAGGCAGACTGGTAAAACGTCTGCTGA |
| | GGTGTCGCAGATGGTGTCGAAGGGGCAGATTGATTTTGCCACGTTTGCGGCTGCGATGAAGCTTGGCATGGGTGGTGCTGCG |
| | CAGGCGTCTGGTCAGACGTTTGAGGGCGCTATGAAGAATGTTAAGGGCGCCCTGGGTTATCTTGGTGCCACGGCTATGGCGC |
| | CGTTTCTTAACGGGTTGCGGCAGATTTTTGTTGCGTTGAATCCGGTTATTAAGTCTGTTACGGATTCTGTGAAGCCGATGTTTG |
| | CGTCGGTGGATCAGGGGATTCAGCGGGTGATGCCGTCTATTTTGGCGTGGATTAACCGTATGCCGGGCATGATCACGAGAAT |
| | GAATGCACAGATGCGCGCCAAGGTGGAGCAGCTGAAGGGCATTTTTGCGAGAATGCATTTGCCTGTCCCTAAAGTGAATTTG |
| | GGTGCCATGTTTGCGGGTGGCACGGCTGTGTTTGGTATTGTTGCTGCGGGGGTTGGGAAGCTTGTTGCAGGGTTTGCCCCGCT |
| | GGCGGTGTCGTTGAAGAATCTGTTGCCGTCGTTTGGTGCGTTGAAGGGTGCCGCCGGGGGGCTTGGCGGCGTGTTTCGTGCCC |
| | TGGGGGGCCCTGTCGGTATTGTGATCGGCTCGTTTGCGGCCATGTTTGCCACTTACGCCCAGTTTCGCGCCCGGGTAATGCTG |
| | CTTGTGGCTGTGGGTGGCCAGGCT |
| | SEQ ID NO.: 18; >6957 len:8925 cycle: O |
| | GCACAGCTCGCCGACCTTCTGAAACAGTACAAGAAGATCATCACCAGTAACAGGGACGTGTCTGAGGCTTTCCGCACCAAAC |
| | GCAACAGCCTCACCCGATAAAAACCGACACAAACCAACAAAACCAAACATAAACAGTAAAAGGAAAACAGTTATGGGACTC |
| | GCAAACTACCGCAACAACAGCAACAGCACCTTCTTCAACCCCTCCCGAAACCAGGACGCCACCGCCATCGCCTTCAAAATCC |
| | GCGACGTGCAGCACAACACTGAAGGCTACGGCGGACAGGTCGCAGACCGCATCTACGCTGATGTCACAATCTTCCACACCCT |
| | AGACGATCTCAACAACAGCACCCCAGAAACCATCCCCAACGCCATTATTGAGAAAGCGCGCGGCAACAACGACCGGCCACA |
| | CTCCATGATCCGCGAACTCGAAACCTACCTGGGAGAAGAGCAGGCCTTCAAACTAGCCACTGTGCGCACCAAAAACGGGTTC |
| | AACGCCGTTATTCTCAAACCATTGGACGACGCCATCTACGATAAGGTTGCCGAATACGTAGACAAGCGCGATAATGGCCAGA |
| | TAGACGACACCACAGCCTCTACTGACATCGATATCGACTCCATCTGACCACCACTCTCCGCCCAAACCGTAACAGATAGATA |
| | AGGTTCCGATGCTCTCTCTCCAACGATCCTTCGAGAGAGCCTCCCAAACCGCAGCCGAGCTGCCCCGCATACCACAACTAGA |
| | ACCCCTCTACCGCAACCTGGACATGCACATCCACAAAGGGGATCTCATCATGATTGCGGGGCGCTCCGGCAGCCAAAAATCC |
| | GGGCTAGCCATGTTCATCACAGCGATGCTCAACCAGCCCGCCCTCTACATATCAGGGGACATGACACCCTGGGAGGCCTCCA |
| | CACGAATCATCTCACTCAACACCCAACACACCACCACACAGATACAACAAAACATCGACGACTACGGGCCAGAATACTATCG |
| | AGACAGCATCCACCACGGCCAACGCATCACATTCTCATTCCAGTCACCCATCACATGGACAGACATCACCATGGGATTGCAA |
| | GCCTACATGGAAATGTGGAACACCTTCCCACCACTCATTGTTATCGACAACCTGATGGACATTCAAGACTGCGAATCCGACTA |
| | CCAGGCACAGCAAGAAGCCATGCAATGGATCACAGCAGTGGGCAGGGATACTGGCTCCACCATTATTGTCACACACCATGCA |
| | ACCGACAAAACCGGCTCCGACATCGAACACCCGCCAGCACGGCGAGAAATCAAAAACGGACTCTCAGAAAAACCACAACTC |
| | ATCCTCGGAGTCTCATTGTATGGTGGCGAGGATAATGGCAACGGCCTATCGATACCGGCAGAGGCACGCATCGCAGTGCTAA |
| | AACAGCGCACCGGCAAATCCAGCCCCGACGGCACCCGATACGAGCGGCTACGAGCCTACCCCGAATACACATTCTTCGGGCC |
| | ACTCGCCGAAAAACATCCCTGGAACATGACCACAACACACAAAGGACTATGATGGCGACACAGCAGGCACGCAACCGGCGG |
| | GCCGGAGCCGAATGGGAAACACGATTATTGCACCAGCTACGCGACACCGGACACAATATCGAACGCCTCCACCCCAACGGT |
| | AAAGAGGATGAGGGCGACCTCATCCTCACAACCGGCAACAAAACCTACATTATCGAGGCGAAAGCCGGGCAACCACACCTA |
| | GCCCAATTCGTCAAAGAAGCAACCCTTGAGGCACGCAACTACGAAACACACCGAAACAAACAAAACAATTCCACCATCGGA |
| | CTCGTAGTAATGAAACAGCGCAACAAGCCATGGAGGGAAGCCTATGTGGTATCAACCCTCAACGAGCTCCTCTCACACCTCT |
| | GACACCTGCCGCCTCCTCGACACCTACCGGATACGGTACAACCCGTCCAGGAACGAGCAACACATCCTCTGCCCGCTCCACG |
| | ACGATCACCAGCCCTCCATGAGCATCAACCTCGACAAGGGCGTCTGGTACTGCCACACATGCGGTGTCGGAGGCGGACTTGC |
| | CAAGCTACAACAACGATTAGAAGAAGAAAACCCGAATGTACGACAGTATACGCCCATACAACATTGCGGAACGCCGCCGAA |
| | TCCAGAAAGCCTCGGCCCTCTACGAAACCCACCTCGAAGACATACTCGACCTGCTCTCAGCAAGAGGCATCAGCGAAGAAAC |
| | AGCCCGCTACCACCACCTTGGATACATCGACAATGACCCCATACCAGGCCACGAAAACTACAACCAGTGCATCACCATCCCA |
| | TACATGTACCCCTTTTTGGGCGGCCCAGCCGAAATACGAAAAATGCGTTTCCGCTGCTCACTCCCGCACGACTGCAAAACCCA |
| | CAACCACCCCAAATATTTGACCCCAGCCGGGGACACAGGCTCCATCTACAACATGGCCGCCATGGCCAACCCGGCATCCGAA |
| | ATGCACATTTGCGAAGGCGAATTCGACTCCATGATCCTCGAACAATGCGGATGGTCGGCCGTTGCCCTACCCGGCGCAACCT |
| | CGTGGCAAACTTTTTGGACCAAATTTTTTGAAGGCTATGACCACATCTACATATGGTCCGACCCAGACCCGGCAGGCGACCA |
| | GATGGCCCAAACCCTCCAGTCAGCACTCCCCCAAGCCACCCATGTGCCCCTCACCCTGGGGGATGTCACAGACACCTACCTTC |
| | AGGCCGGAAAAACAGGGTTGACACAAGCACTAGACACTGTGCTACAGTAAAACACGTCAACAACACGAAACCAGAAAGGTA |
| | AACTAAAACATCATGGATCCGCTCGACACGTGCCCCATCCCCAACCGGCGCAAGACCAGCCAAACAGTCAGGAGGCGTATCC |
| | GCCTCGCCATCTGTGCAGAAAAATGGGCTGATGGTGAAGACCCCACCTACATCATGCACACCTGGGGCACCACCTATGATGG |
| | GATGCGATCCATGATCCGCGCCAACCCCGATATTAAACCACCCGACGACATGGCAGAACGTTTGCACAAAGTATGCCGGGAA |
| | ACCTACCCCAAAAACCAGCCCAACAGGCACCGAAGCGGATGGGACGCTTACGAGAAAAACTACTACACCCACGAAATCCTC |
| | TTCCTGAACCAATTTAACATCCCAGCCCTCGAAATCCTCGACCGGCTAGACGTGTCATGGACAATGTGGAAACAAATCATCA |
| | CCGAAAACCATCTCACCCGGCTACAAGACGAAACATACAATGCGTGCCACTGGCACTATCTGAAACAGCAACACCCAGACTG |
| | GACCGACCAACAAATCACACAAGCCCAACACGCCGGGAACAACACCTTCAACCAGTTCATGCAAGACGAACAGCCGGCACT |
| | ATCGTGAGCATCTCGTTCAAACCCACAAAACGCAACCTTCAAACCATCCGAGACATCCTCACCCAGGCCACCAACCTCAACC |
| | CTGACGATCTGCCTGACGACACCCTCAACAACATCATCCAATACTGCTGGAACACCTTCACCGACAACAACCGGTACGCCGT |
| | CGCGGCACAATACTGGCGAGGCCAAAACCCACCCGACAGTGAACATCAGCGCATACTAGTCGGCTACTACAAAACCGCTAA |
| | ACAAGCCATGAACGCGGCCAAACAATTCCACTGGAACACCCGGCTACAACAACAATGGAAAACATGGATACTCCCAGTCCA |
| | CAACGGCACCGTATCAGAGCATTTCACCAACCAGAAAACACTCTTCGACACACCAACCAGCAACCAGGGTGACGCCGCACTG |
| | CCGGAGCATCTACAAAACGTCATGTGCGGCAAAACACTCAACCACACAGACGGAACCGTATCGTGGTGCACACGCAAACCA |
| | GGTCACGACGGCGACTGCCGCACAGGATGGCAACCCACCACACAACCGATAGGACACCATGGCAACCAAAACTGAAACACT |
| | CATCCAACGCTACGGTAACAAGGCTGCCGACGTGCTCGCCGACAAAACCATCCCCGCCTCATGGCTAGCAAAACAGCTCACC |
| | CAGGCAGGATACCCCATCTCCCCCACTGTTATTAAAGACTATCGCCACAAACAAGCCAACACCACCCCGCAAGAGGAGAATA |
| | TCCGATGATAGACAATATTGACCGGCTACTCACCCAGCTAGCCAACCACGACAACGCCATCGACACCATCGACGACAATCTC |
| | GCCAATGGTACTGTACGCCGCACACGCATCTCCGAATGGACACTCCCCAACGGAGAAACAGGCCGATCCGTACAAAAAATCA |
| | TCGACCACCAACCCGCAACAAACCCCTACCCTGTAGACGAACTCGTCGATAAACTAGCCGAATGGCCACCCCCCAAACAGTC |
| | CGACACCCGTAGCAGCGATGCGGCCTTCGTCATCGGGGCAGGCGACTTCCAAATCGGCAAAGGCATCCCCGGAGGGGAAAC |
| | AGCACACTTCGCCGACGACTACCTACACTCCCTCGCCTCAGCTAAACACTACTGGCAGCAAGCAGGCCAGCCGCAACGAGTC |
| | CACATAGCCTTCCTCGGCGACATGATCGAAGGATACGTGTCACAAGGAGGCAACAACGCCTGGCGCACACAAACACCCTTGA |
| | CGGAACAAATCAGGCTCACCCGTATGGCCATGATGCAACTCATCCACATGTTCGACCACTGCGCCAACGTCACCATCACATC |
| | CATCCCCGGCAACCACGGTGAAGCCGTGCGCTTCGGTAAAGGCGTCACCACCTACGACGACTCCTTCGATGTGGACTGCTGC |
| | CGGGCCATCGCAGAAGCCCACCAGCTCAACAACCAATACCCCAACCTTCACTTCCACTTCCCCAGCCGAGACGAAATGACCA |
| | CCACCGTTGATGTGGCCGGTACACAAATCCTGCACGCCCACGGACACCAATGGCGCAACAACCAACACTACGAATGGTGGCG |
| | CGGCCAAGAATTCCACAACGGCACCGTATCCCACATTCTCATGGCCGGACACAGGCACCACCTCGAAATATCCGAGCAAGGA |
| | CAACGCACATTCATACAATGCCCATCCATGGAAGGAGAATCCGTCTGGTACCGGCACAAGACAGGCACCACCGGCAACCCCG |
| | GACTCGTGTGCTACACAATCAACCATAAAACACCAAACAACTACCAGATAGCCAGATAAAAACCATGAGTAGACGACCAAC |
| | CAAAGTCCAACAAGCCACCACCGCCAACTGGGGGTGGGCAACCCACCACCACCAACACCAGCTACACAAAGCTTGCACCAA |
| | CATTGCCCGCCACTACCCGGCCGTCAACCCCGACGACCTGTACCAAGACTCTCTACTATATATTGCGGTACGCAACCAATACC |
| | ACCAACTCACAGGCAACCAGTGGACCCAAATGTGCTACCGTGTCGCCCAACGACTAGCAAACAAAACAGTCCACCACCTAGA |
| | CCTACCCAAACCCGTCCAAGAAATCACAGCCATAGCCGACAACCAAACCAGCAACTAAGGAGAACCACAATGGTCACAACC |
| | ATCCTCGACGACGGCACCCAAACCACCAGGCTACAAACCGTAGGCTCCACCACCACAGCCATCATCACCAACACCGAAACAC |
| | CCGAAACCATCACCACCAAATACACCATCAGCAAAGACGGCACAGCCACCTACAGTATCAGCGGCAACACCTATTTGGGAG |
| | ACCACCAACACATCATCAAACTCATGTACGACTACTGCCACTGCGTCGGACGCTTCGACACCACCAACACCAACAGCCCAGA |
| | CAACCTCGACAACCTGTTCAGGGGGTGACACATGAACCACACCTACACCACCGCAGATATTATTCAAGCAGCCCAATGGATC |
| | TGGAACGGCGGCCCATGGAAACCCTCAGTAGAACCCGGCATGCCACCCCCACCAACCGCCCCCCAACACCACGGCAACAAC |
| | ATCGTCTCCATGATCGATTTGCAGCTAGCCATCGACGACTACACCCTCACCTGCCAGCCATCCAAACAGCGAAAACATTTGGC |
| | ACGGTTGGCAGCATTCCGGGAAGTCTACGGGTATGACCAAACATATGCGTCGGCCGCCCAACGATTGGGTGTGACAAGACAA |
| | ACCGTGAAACAGTGGGCAGACCAAACACTCATCACCCTCACAGGATACGCAAACAGTAAATACTATCCAGACGGCAACGAC |
| | GACAGCACAGGGATGGGATAAAACCATGAACAACACAACCAATATCCCCTACACTGCCCTCAAAACAGCGGTACACCGAAT |
| | CATCCAACAACAGCCCACCAACATGCAACAACTAGAAAACATTGTTGACGGTGTCGAAAACCAGTACCGTGTACCCATCTCC |
| | CTCGATGATGTGAACCTCACCGTCAAAGAAGTCAGCCTCGACGATCTCGACATCGACCAGGACACGCTAGACGAGTGCAGCG |
| | AAATCCTGTGGGACTGCGACAGTGCAGGACACCCCACAAACAACAGCAACACCCATGGCATGCCAGACGACACACAGGCAA |
| | GCCATGAAGCCATAGACTGGCTCGCCAGAATCGCATACCAGGCAAAACTACTGCAAGCGGAGGCCGACGATATCATGCAGT |
| | CCATCCTCTACCACCGCGACAACCACAAAGGCGTTATCGGCCAGGATGTTCTGCACCAGGCCAACGAAACTATCTCTACCTG |
| | CCTCCACCTGTATCAGATGCTCGAAGACACCATCGACAGCAACGAATCATAGCCACACCGCATAAACAAAAAGAGTGCCCCA |
| | GCGGCAACCACCACACAATCGTGGCAGCACCGCTGGGGCACACACATATTCAATTATGCAACAGTAGACTCTACCGTGCCAA |
| | CCTCCGACTCGGCGGCACGCCTCGGCTCATAGCCACCAAAATCAGCATCATCCTTCGGCTCGATCATGCCCGGATCCGACACA |
| | TCCACCGAGTGCGGCTCAACCAAGCCCCCATCGTCGGGTGGAACAAGCCCAGCATCCACAGGCGTAGTTTTCGGCTTACCGG |
| | CCACAAACGACGGGCTACCAAACGAGGTAGCAACCGACAGCACCGCAGCCACCGTTGCTGTAATCAGGGCAGACTCCCACG |
| | GCAAACCGCGAAACGACTCCGCAGTATACGTGACACCCGCCGTCACACCCAACACAGCAACAAACGTTTGAATAAAAGTTTT |
| | CAGTGCACGCTCAAACAAGCCCAACCAAAACTGTTTACCCACAACAAACCACCATCACTTTTTCAAACCGTTGACAGTCGAC |
| | TCAAGCCTGTCAATACGGCTACGACACTCCAGCACGTAATACCAGACACTCCACAAAGCGTCTTTTGTGCGCCACAGCTTCCC |
| | CGTCACCGGATTCTTCACCCACGACAAAGCCTCCACACGGCGCGCCAAGTCACCATTCTGAACCTGAACCACACCCACATCG |
| | TGATGCAGCTTATTCACCGACTGGGCCACCTGCCCAGACAACTGTTTAATCTGATCATGTAACGCTTTCACATCAGCCACCGT |
| | TAACTCCTCACTCTCTCCACTGCCGCCATTGACGACGGCCATAAACCTGTCCCACGGAAACCACGGCCCCGGATCGTCATGAT |
| | CCGACTGATGCCACGCATCCGTCACATCCACATGCCCGCAAACCCCACGCCTGCCAGCCTTCAAATCGGCAGCCGACAGTTTC |
| | CTTTTCGGAACATTATATTTGTCACACAAACGTCTACACAGCATGGCAGCCTTCTCCACCGCAGGCCACACGCGAGGATCAAG |
| | CCACTGCTCCCGAGTGTAGGCGTGCCCCGGCACCCTAAACGAGGCGTGCGAACCCCCATCCGCGCAAATCTCGATACCTAAA |
| | CTATGCGGATTCGGCGGGGCATGCCACCCAATCGTAGACTCCGACAAGCACTGCACCGTCTCCCCAATATCGCAAACATAAT |
| | GCGCCGAACCACCAGACGATGGGGACGCGAAATAGTTTGCCGTGGACACCGCCCGCCCTTTACGGGAGGCAGACGGAAACC |
| | CCACATCCGGGCACGTCGCATGAATCACAACCCTGTTCACCGGACTATTCGAGCCGGCCGAGTGATGCGCTGCAGGAATAAA |
| | CCTCACCACACACCACCACCAAACACTACCATCACAGCCACTCCTTTCTATTTGTGGGATGATATAGTCACTATAGGCGACGG |
| | TTTCACACCCTGGCAGGCCACCGAGCCCGATATTGTAGAAGCCACACCGTCACTATATTTCACAACAAGGCGGCCCCCGGAA |
| | CAGTACACAGACCCCACCGAGCGCCCATCTTTACCGTCTTTACCGTCGAATCCGTTCACACCAGCGGGGCCACGCTCACCCCG |
| | TTCACCCTGCGCGCCTTGCGGGCCGGCAGGACCCGAAGGCCCCACATCGCCGCGCCCACCGACCGAACCATCCCGACCATCA |
| | GCGCCGTCAACGCCGTTCACACCATCAGCACCTGCACGACCCGGAACACCATCACGGCCATCCGACCCATTCGCGCCAGGCA |
| | ACCCGTCAGGACCTTTCACACCATTCAAACCGGGAGAACCCTGCGAACCAACAGGGCCAACCAGCCCCGCCGAACCATTAAC |
| | ACCATCCCGGCCGCGTACACCTGCAGGGCCTTGTGGGCCGCGTACACCTGCAGGGCCAGGCACACCCTGCACGCTACGCTCA |
| | ACACGCACAGCATCCACACACATGCCAGACTGGTGAAGACGCACCGACTCCTGCCCACCCGAAGCACACGCCTGCCGCACAC |
| | GGTTTGCCAACCCTTTAGCCGCTGTACCATTAGACTGGGCCCTCGCCTGCTCCGAATCCCGCTCAGAGGATACAGCCCCGAAA |
| | CGCAAAGCACCCCCGGCAACCACCGCCAACAACACAAGCGACAAAAACAGCAACACCAGTGAAAACTTCTCAAAATTGCGG |
| | CGCTGCCGCTTCTCCTCCTCCAACTCCCTCAACCCTACTCACCTCCACCATCAACAGTATCTTTCAAAAACTCGGGCACATCA |
| | SEQ ID NO.: 19; >7340 len: 11354 cycle: O |
| | CCTGCGANCACATGGATTTCGNGGGCCTNGCCGAAGCCTACCGGCAAANCGTGGANGCCGAANTCCACAAGCTNCGCCCCA |
| | ACACGTTCATCGCCACCGACGGCACCGTCTACAGCCATGACGAGTGGAAGCCACTCACCGGTGGGGAAGCCACGCAACTCTT |
| | CTGGAACGTGATCCGCATCAATGTTGGCCATCTACTCACCCTGTTCGCCCTATAAAACCCCCACCACACACAATGAGTCTAGA |
| | ATCGCCTAGAAATACCTGACCTATATAATCCTACCTAAGAGCGCTAAAAGTCTCTTGTACGCTAAATGCAGTAGCTTAAAACA |
| | CGAAAGAAGGACCAATCATGCAATGGACATGCCACAAGTGTGACACCACAATCATCGGATACCGACCAGAACACTGCACAA |
| | TCTGCCATGAAACATTTAATGGCACTCATGCCGGGGACATGCACCGGACAGGCGATCACGGGGTCAAGGAAGGCCCCAGTCG |
| | CCGCAGGTGCCTCACTGTGGACGAGATGGAGGCTAAGGGATGGCTCGTAACCGCCATGGATACTGGACGCAAGGTAGTGAC |
| | ATGTCACGCTTAAGTGACAAAACCCCAAGCCACACAGGAAACGCTCACACAAACTGAGCGACACCTTGACAGTGGTAGTAC |
| | AGTCTGGAAATATTAACCATGTCAGCAACGAACAACACCCCAGAAAGGGGAACACAGCCATGAACAAGAAAAAAGGCTACA |
| | CCATCGCAGGCGCCACTATCGCCATTATTGCCGCATGCTCTTTCCTGCCAGCACCCGACGACAACCCGCCACTCGCCTCACAG |
| | TCAGCCGCACAGGCCACCACAGCCAACACCACATGGACACCTGAAACCGCCCAGCAGCGCAAAGCCGAGAAAGCAGCCAAG |
| | CAGGCCGCAGCAGTCCGCTCCCTACAAGCAGAACAAGCCAAAACCCACAAGCAAGCCCAAACAAGGGGTGAAGAAACCGCC |
| | ACCGGACTCACCATGCTCACCGCTGCACACGCCTGCAACCGCAAAGCCGAACAACAGGCCGCAGCACACGGTGTCAACTGG |
| | AACGGCAACCCCGACATCGACCTCCAACTCCACAAAACCATCGGTAAAGACACCTTCTCCATCGTCTACGGTGCAACCATGA |
| | AACAGCCCGGCGCATCCAAACTCCCAGTCACCGTACACTGCCTCGCCACCGGAACAGAAGACCACCCGCACGTCACCGACCT |
| | CAACATCAACCCGCAACAGTAACCCGCCAAGGAGCATCCCCGCTATGCCTCTCCTCTCCCACTATGCTGTCACCACCGGACTC |
| | GCCGACACGGCACACATTATTCACCACACCGGCGGCACACTACGCACAGCCACCGATATTGCATCCCGCATCAACGCCCTCA |
| | ACCCAGACATTGATCTCGACCACGAAATCCACCAACTGTTATCTATCGAAACCGACCTGTACAACATTTATAAAACCATCAAC |
| | ACCATTCTTCAGGAGCAAGCATGAACACCCCCAACAACAACATTGAGCTACACAGCTACGAAACGTTCTTCACCAGCCTAGC |
| | CTGGATCCAAGGCGGCATCATCACATGGATGTACGCCACCGGCACCCCACACAAGGCAGCCCTCGCCATCATCGCCGCATGC |
| | GCCCTCACCACCCTCCTAGGCGCATCAACACTCACCAACAATCCCCGAGACACTAAATGATCACAACACCCATCCTCATCGCT |
| | GAAACCCTCGCCATCATTATTCTCGCCGTAGCACTAGCCCACAACAACAACCAGTAACCCGCACTTAAGGAGCACACACCCC |
| | ATGGATAAGCCAACCCGCATATACACCAACCCCGAAACCGGCGCCAAGAAAGAACTCAAACTCTGCAGGCTATCCCTCATCG |
| | AACCCGCCGCCTTGCACTCGCTCGGCGAAGTAGCCGGATATGGTGCCACCAAATACGGCGACAACAACTGGACCGGCGGATA |
| | CCCCTGGTGTCACAGCGTCGACGCCCTCTACAGGCACCTGCTATCATGGCAGCAAGGAAACAACCTCGATTATGAATCCGGG |
| | CTACCCCACCTGGCACACGCAGCCTGGCACTGCCTCGCACTCCTCGCATACCAGCAACACAATGCCGGGGTAGACACCCGCA |
| | ACCCATGGAACACCCACAAAGGCGACCAGTAATGCCTCTAGCACAATACCCGAAAACCATCCACCATCCAGGCCACATCTCC |
| | TACTCATCACTGTCACAGTGGGCCGAATGCGGAGAAAAATGGCGCCTATCCCACGGCTACCACACCCAACACCACACCTGGT |
| | ACGCCACCATCGCCGGCAGCGCCATACACCACATCACCGAACAATACGACCTACACCTGTACAACCCCACCGAATACTCTGC |
| | ACTACCAGACAAACTCTCATCCTTCAAAAACATTTTCGACACCCAAGTCGCCCTCGCCGAATCCGAGGGCACAGAAATCGAA |
| | CCCTCCGGCAGAATATGCAAAAACATGTGTGAGTCGGGCGGGCCACACAAGAAAGACTACGGCTGGTGGATGGTTTACGGC |
| | CCCACCTTTGTGGACCGCTGGAAAACATGGAGGCGCAACCACCCAGAATACATCACCGCAATCCTGGACGGTAAACCAGGCA |
| | TCGAATACCCGGTAGAAACCATCCTGAAAGATGACACAAAAATAGTCGGATATATTGACAGAATATTCACCAACACCGACAC |
| | CGGCGAAACCTTCATCCTCGACCTCAAAACCGGACGCCTACCCGCCGACAGTATGCAGCTGCACACATACCGATACATGCTC |
| | AACCAACACGGCAACGATGTGACAAAAGGCATGTTTTGGACGCCAGCCACCAGCCGCAACGACGACAAGTCCCCAACACAA |
| | GGCACATCCACCGAACTCTACGACCTTGACAACAACACCTACCGGCATGTATCATCCATGTACAGTCAAGCAATGAAAGGAA |
| | TCAGCGAAGGCATCTTCGTCCCACACGTCACAGCACTCTGCAAAGGCTGCCCCGTACAAGACGCCTGCTGGGCCGTCAACGG |
| | CAAAAACTCGTACAGATACCCGATAGAATCAACCGTACAGCCACCAGAAACAGACAATAAAGAAAAGAACACCAAATGACC |
| | GATAAAGACAAGATCGACAATGATCGACTCACGATCACACTCAAATACGGTGGCGACTATGCTGCCCCATGGGCCGTCATCC |
| | GCGGAGACACCGCAGAAGACATCAAACAATCCATTATTGATCTGCTAGGAGGATTGAAAGACGAAACCGTATCCAAAGACT |
| | GGGACCTCGCAACCCTCATCGCTAGCGCAGCAATCCCGCTTCAAGACCGATACGATAAAGCCGCCAAAGACTACGTCAACAA |
| | GATCGCCAACAAGGAAAACGACATCATCATCGACCGGATCAACAAAGCCACCAGCAAGGCACAGCTCGCCGACCTTCTGAA |
| | ACAGTACAAGAAGATCATCACCAGTAACAGGGACGTGTCTGAGGCTTTCCGCAGCAAACGCAACAGCCTCACCCGATAAAA |
| | ACCGACACAAACCAACAAAACCAAACATAAACAGTAAAAGGAAAACAGTTATGGGACTCGCAAACTACCGCAACAACAGCA |
| | ACAGCACCTTCTTCAACCCCTCCCGAAACCAGGACGCCACCGCCATCGCCTTCAAAGTCCACGATGTAGAACACAACACTGA |
| | AGGCTACGGTGGACAAACAGCAGACCGCATCTACGCTGATGTCACAATCTTCCACACCCTAGGCGATCTCAACAACGGCACC |
| | CCAGAAACCATCCCCAACGCTATTATTGAGAAAGCGCGCGGCAACAACGACCGCCCACACTCCATGATCCGCGATCTAGAAG |
| | CCTATCTTGGCGAGGAGCAGGCCTTCAAACTCGCCACCGTACGCACCAAAAACGGCTTCAACGCGGTAATCCTCAAACCCCT |
| | TGATGACGCCATCTACGATAAGGTTGCCGCATACGTAGACAAGCGTGATAACGGCCAGCTAGACGACACCACAGCCTCAACT |
| | GATGCTGATATCGACATCGACTCCATCTGACCACCAAAACACAACCAACCAATAGATAGATAAGGTCCCGATGCTCTCTCTC |
| | CAACGATCCTTCGAGAGAGCCTCCCAAACCGCAGCCGAGCTGCCCCGCATACCCCAGCTAGAACCCCTCTACCGCAACCAGG |
| | ACATGCACATCCACAAAGGGGATCTCACCATGATTGCGGGGCGCTCCGGCAGCCAAAAATCCGGGCTAGCCATGTTCATCAC |
| | AGCGATGCTCAACCAGCCCGCCCTCTACATATCAGGGGACATGACACCCTGGGAGGCCTCCACACGAATCATCTCACTCAAC |
| | ACCCAACACACCACCACACAGATACAACAAAACATCGACGACTACGGGCCAGAATACTATCGAGACAGCATCCACCACGGC |
| | CAACACATCACATTCTCATTCCAGTCACCCATCACATGGACCGACATCACCACGGAATTGCAAGCCTACATGGAAATGTGGA |
| | ACACCTTCCCACCCATCATTGTTATCGACAACCTGATGGACATCCAAGACTGCGAGAGTGACTATCAGGCACAGCAAGAAGC |
| | CATGCAATGGATCACAGCATTAGGTAGGGATACTGGCTCCACCATCATCGTCACCCACCACGCCACCGACAAAACCGGCTCC |
| | GACATCGAACACCCGCCCGCCCGGCGAGAAATCAAAAACGGCCTCTCCGAAAAACCACAACTCATCCTCGGGGTCTCATTGT |
| | ATGGTGGCGAGGATAACGGCAACGGCCTCACGATACCGGCAGAGGCTCGCATCGCAGTGCTAAAACAGCGCACCGGCAAAT |
| | CCAGTCCTGACGGCACCCGATATGAGCGGCTCAGAGCCTACCCCGAATACACATTCTTCGGCCCCCTGGTAGAAAAACAGCC |
| | ATGGAACATGACCACAACACACAAAGGACTCTAAAAAACTATGGCCACACAGCAGGCACGCAACCGGCGGGCCGGAGCCGA |
| | ATGGGAAACACGACTCCTCCACCAGCTACGCGACACCGGCCACGATATAGAACGCCTCCACCCCAACGGCCGCGAAGACGA |
| | AGGCGACCTCATCCTCACAACCGGCCACAAAACCTATGTGATCGAAGCCAAAGCGGGCCAGCCACACCTAGCCCAATTCGTG |
| | AAACAAGCCAGCCGGGAGGCACGCAACTACGAAACCCACCGAAACCGCGAAAACCAGTCCACCATCGGACTCGTCATCATG |
| | AAACAGCGCAACAAACCCTGGAGCGAAGCCTATGTGGTATCAACCCTCAACGAGCTCCTCCCACACCTCTGACACCTGCCGC |
| | CTCCTCGACCACTACCAGATACGCTACAACCCGTCCAAAAACGAGCAACACATCCTCTGCCCGCTCCACGACGACCACCAGC |
| | CCTCCATGAGCATCAACCTCGACAAGGGCGTCTGGTACTGCCACACATGCGGTATCGGAGGCGGACTCCACAAGCTACAGCA |
| | ACGACTAGAGAAAGAAAACCCGAATGTACGACAGCATACGCCCCTACAACATTGCGGAACGCCACCGAATCCAGAAAGCCT |
| | CGGCCCTCTACGAAACCCACCTCGAAAACATACTCGACCTGCTCTCAGCAAGAGGCATCAGCGAAGAAACAGCCCGCTACCA |
| | CCACCTTGGATACATCGACAATGACCCCATACCCGGCCACGAAAACTACAACCAGTGCATCACCATCCCATACATGTACCCC |
| | GTTTGGGGCGGCCCAGCCGAAATACGAAAAATGCGTTTCCGCTGCTCACTCCCGCACGACTGCAAAACCCACAACCACCCCA |
| | AATATTTGACACCGGCAGGGGACACAGGCTCCATCTACAACATGGCCGCCATGGCCAACCCGGCATCCGAAATGCACATTTG |
| | CGAAGGCGAATTCGACTCCATGATCCTCGAACAATGCGGATGGTCGGCCGTTGCCCTACCCGGCGCAACCTCGTGGCAAACT |
| | TTTTGGACCAAATTTTTTGAAGGCTATGACCACATCTACATCTGGTCCGACCCAGACAAGGCGGGCCACCAGATGGCGCAAA |
| | CCCTAACCCAAGCATTACCGCAAGCCACCCATGTGCCCCTCACCCTGGGGGATGTCACAGACACCTACCTGCAGGCCGGAAA |
| | AACAGGGTTGACACAAGCACTAGACACTGTGCTACAGTAAAACACGTCAACAACACGAAACCAGAAAGGTACACTAAAACA |
| | TCATGGATCCCCTCGACACGTGCCCAATCCCCAACCGGCGCAACACCAGCCAAGCTGCCAGGAGGCGCATCCGCCTCGCCAT |
| | CTGAGCAGAAAAATGGGCTGATGGCGAAGACCCCACCTACATCATGCGCACCTGGGGCACCACCTATGATGGGATGCGATCC |
| | ATGATCCGCGCCAACCCCGACATTAAACTACCCGACGACATGGCCAAACGGTTACACAAAATCTGCCGGGAAGCCTACCCCA |
| | AAAACCAGCCCAACAGGCACCGAAGCGGATGGGACCAATACGAGAAAAACTACTACACCCACGAAATCCTCTTCCTCGACC |
| | AGTTTAACATCCCAGCCCTCGAAATCCTCAACCGGCTCGACGTGTCATGGACCATGTGGAAACAAATCATCGAAGAAAACCA |
| | TCTCACACGGCTACAAAACGAAACCTACGATGCGTGCCACTGGTATTATCTGAAACAGCAACACCCCGACTGGACCGACCAG |
| | CAAATCACACAAGCCCAACACGCCGGGAACAACACCTTCAACCAGTTCATGCAAGACGAACAGCCGGCACTATCGTGAGCA |
| | TCTCGTTCAAACCCACAAAACGCAACCTTCAAACCATCCGAGACATCCTCAACCAGGCCACCAACCTCAACCCAGATGATCT |
| | GCCAGATGACACCCTCAACAACATCATCCAATACTGCTGGAACACCTTCACCGACGACAACCGGTACGCCGTCGCGGCACAA |
| | TACTGGCGAGGCCAAAACCCGCCCGACCAGCAACACCAGCGCATACTCGTCGGCTACTACAAAACCATAAAACAGGCAGAA |
| | AACGCCGCCAAACAATTCCACTGGAACACCCGACTACAACAACAATGGAAAACATGGATACTACCCGTACACAACGGAACC |
| | GTCTCCGAACATTTCACCAAACAAAAAACACTCTTCGACACACAAAACGATAACAACCCGGAGCAGCTACCACAGCATCTCC |
| | AAGAAGTCATGTGCGGCAAAACACTCCACCACACAGACGGCACCACAACATGGTGCACACGCAAACCAGGACACGACGGCG |
| | ACTGCCGCACAGGATGGCAGCCCACCACACAACCCCTAGGACATCATGGCAACCAAAACTGAAACGTTGATCCAACGCTACG |
| | GCCGCAAAGCCGCAAACGTCCTCGCCGACAGGTCTATACCCGCATCCTGGCTATCAAAACAACTCACCCAAGCCGGATACCC |
| | CATCTCCGCCAGGGTCATAAAAGACTACCGCCGAAAACAAGCCAACACCACTCCACAAAAGGAAGAGGATACCCGATGATA |
| | GACAACATAGACCGGCTCCTCACCCAGCTAGCCAACCACGACAACGAAGCAGACACCATCCGCGATGATCTCGCCAACGGA |
| | ACCGTACGCCGCACACGCATCTCCGAATGGACCCTACCCAACGGAGAAACAGGCCGAACCATACAAAAAATCATCGACCAC |
| | CAACCCGCAACCGACCCCTACCCTGTAGACGAACTCGTCGATAAACTAGCCGAATGGACACCCCCCAAACCCGAACAAGACA |
| | CACACACCAACTACAGCACTGCAGCCTTCGTCATCGGGGCAGGAGACTTCCAAATCGGCAAAGGCATCCCCGGCGGAGAAA |
| | CAGCACACTTCGCCGACAACTACCTACACACCCTCATCGTCGCAAAACACTACTGGCAACAAGCAGGCAAACCGCAACGAGT |
| | CCACATCGCATTCCTCGGCGACATGATCGAAGGATACGTGTCACAAGGAGGCAACAACGCCTGGCGCACACAAACACCCCTC |
| | ACCGAACAAATCCGGCTCACCCGCATGGCCATGATGCAACTCGTCCACATGTCCGACCACTGCGCCAACGTCACCATCACAT |
| | CCATCCCAGGCAACCACGGTGAAGCAGTACGATTCGGTAAAGGCGTCACCACCTACGACGACTCCTTCGATGTAGACTGCTG |
| | CCGCGCCATCGCAGAAGCCTACCAGCTCAACAACCAATATCCCAACCTACACTTCCACTTCCCCAGCCGAGACGAAATGACC |
| | ACCACCGTTGATGTGGCCGGCACACAAATCCTGCACGCCCACGGGCACCAATGGAAAACCGGCAAACAGTACGAATGGTGG |
| | CGCGGCCAAGAATTCCACAACGGCACCGTATCCCACATTCTCATGGCCGGACACAGGCACCACCTCGAAATATCCGAGCAAG |
| | GACAACGCACATTCATACAATGCCCATCCATGGAAGGAGAATCCGTCTGGTACCGGCACAAGACAGGCACCACCGGCAACC |
| | CCGGACTCGTGTGCTACACTATCCACCATAAAACACCAAACAACTACCAGATAGCCCGATAAAAGAGATGCCATGAGTAGAC |
| | GACCAACCAAAGTCCAACAAGCCACCACCGCCAACTGGGGGTGGGCAACCTCCCACCACCAACACCAGCTACACAAAGCCT |
| | GCACCAACATTGCGCGCCACTACCCGGCCGTCAACCCCGACGACCTGTACCAAGACTCTCTACTATATATTGCGGTACGCAAC |
| | CAATACCACCAACTCACAGGCAACCAGTGGACCCAAATGTGCTACCGTGTCGCCCAACGACTAGCAAACAAAACAGTCCACC |
| | ACCTAGACCTACCCAAACCCGTCCAAGAAATCACAGCCATAGCCGACAACCAAACCAGCAACTAAGGAGAACCACAATGGT |
| | CACAACCATCCTCGACGACGGCACCCAAACCACCAGGCTACAAACAGTAGGCGCCACCACCACCGCCATCATCACCAACACA |
| | GAAACCCCCGAAACCATCACCGCCAAATACACCATCAGTAAAGACGGCACAGCCACCTACAGCATCAGCGGAAACACCTAT |
| | TTGGGAGACCACCAACACATTATCAAACTCATGTACGACTACTGCCACTGTGTGGGACGATTCGACACCACCCGCACCAGCA |
| | ACCCAGACAACCTCGACAACCTATTCAGGGGATGACACATGAGCCGAACCTACACCACCGCCGACATCATCCAAGCCGCCCA |
| | ATGGATCTGGAACGGAGGCCCATGGAAACCCTCCGTCGAACCAGGAATGCCACCACCACCAACCGCCCCCCAACACCACGG |
| | CAACAACATCGTCTCCATGATCGATTTGCAGCTAGCCATCGACGACTACAACCTCACCTGCCAGCCATCCAAACAGCGAAAA |
| | CATTTGGCACGGTTGGCAGCATTCCGGGAAGTCTACGGGTACGACCAAACATATGCGTCGGCCGCCCAGAGACTCGGGGTGA |
| | CAAGACAGACTGTGAAACAGTGGGCAGACCAAACATTGATCACCCTCACAGGATACGCAAACAGTCGATACTACCAAGACG |
| | ACAGCGCAGGGATGGAATAAAACCATGAACAACACAACCAATATCCTCTACACTGCCCTAAAAACAGCAGTACACCGAATC |
| | ATCCAACAACAACCCACCAACATGCAACAGTTGGAAAACATTGTTGCCGGTATCGAAAACCAGTACCATGTACCCATCTCCC |
| | TCGATGATGTGAGCCTCACCGTCAAAGAAGTCAGCCTCGACGATCTCGACATCGACCAGGACACGCTAGACGAGTGCAGCGA |
| | AATCCTGTGGGACTGCGACAGTGCAGGACACCCCACAAACAACAGCAACACCCATGGCATGCCAGACGACACACAGGCAAG |
| | CCATGAAGCCATAGACTGGCTCGCCAGAATCGCATACCAGGCAAAACTACTGCAAGCGGAGGCCGACGATATCATGCAGTCC |
| | ATCCTCTACCACCGCGACAACCACAAAGGCGTTATCGGCCAGGATGTTCTAGACCAGGCCAACGATACTATCTCAGCCTGCC |
| | TCCACCTGGACCAGCTCATCGAAGACACACTAGACAACAACCTGTAAAACCCCTATAGACACAAAAAGAGTGCCCCAGCAG |
| | CAGCCACCACACAACCGTGGCAGCACCGCTGGGGCACACATCTATATTCACTTATGCAACAGTAGACTCTACCGTGCCAACC |
| | TCAGACTCGGCAGCACGCCGAGGCTCATAGCCACCAAGATCAGCATCATCTGCAGGCTCGATCATGCCAGGATCCGACACAT |
| | CCACCGAATGAGGCTCCACTATTCCGGGATCATCCGGTGGAACCAAACCCGCATCCAGCTGAGGCTTGCCGGGCTTGCCGGC |
| | CACAAACGACGGGTTACCAAACGATGTAGCCACCGACAAAACCGCAGCAACCGTAGCTGTGATCAGGGCCGACTCCCACGG |
| | CAAACCGCGAAACGACTCCGCCGTATAGGTGACACCCGCAGTCACCCCCAACACAGCAACAAACGTTTGCACAAAAGTCTTA |
| | GCCGACCGCTCCAGTAAACCTAACCAAAACTGTTTACCCACAACAAACCACCATCACTTTTTCAAACCGTTGACAGTCGACTC |
| | AAGCCTGTCAATACGGCTACGACACTCCAGCACGTAATACCAGACACTCCACAAAGCATCCTTAGTGCGCCACAGCTCCCCC |
| | GTCACAGGATTCTTCACCCACGACAAAGCCTCGACACGCTTACGCAAGTCACCATTCTGCACCTGAACCACACCAACATCGT |
| | GATGCAGCCGGTTCACCGACTGGGCCACCTGCCCAGACAACTGTTTAATCTGATCATGCAAGGCTTTCACATCAGCCACCGTT |
| | AACTCCTCACTACTTGAACCGCCGCCGTGGCCATTCACCACAGCCATAAATTTGTCCCACGGAAACCACGGCCCCGGATCATC |
| | GTGATCCGACTGATGCCACGCATCCGTCACATCAGTGTGCCCGCAGATGCCCCGCCTACCAGCCTTCAAATCGGATACGCTAA |
| | GCTTCCTTTTCGGAACACCATGCTTGTCACACAACTGCCGACACAGGATGGCAGCCTTCTCCACCGCAGGCCACACGCGAGG |
| | ATCAAGCCACTGCTCCCGAGTGTAAGCGTGCCCCGGCACCCTAAACGAGGCGTGCGAACCCCCATCCGCGCAAATCTCGATA |
| | CCTAAACTATGCGGATTCGGCGGGGCATGCCACCCAATCGTAGACTCCGACAAGCACTGCACCGTCTCCCCAATATCGCAAA |
| | CATAATGCGCCGAACCACCAGGCGATGGGACGCGAAATAGTTTGCCGGGGACACCGCCCGCCCTTTACG |
| | SEQ ID NO.: 20; >7471 len: 17114 cycle: O |
| | AACATCTGGTTGACAAGGATGCTGTTGAGTCCGGAAAGGATAACGGCATTGTTGATACAGTAAAAGACGATGGCGGGCAGG |
| | AGGTAGCCGACAATCAGTTGAAGAATGAAGGCGAGGGTAAATCGCCGGGGACTGATTGGAAGGCTGAGGCCCGTAAGAGGG |
| | AGTCTCGTGCTAAAAGTAATTTCGCCGAGTTGGAGAAGCTTCGCGCCTCGGATGGTGATGCGGGGTCTGTGATCGATGATCTT |
| | CGCCGCAAGAATGAGGAACTCGAAGACCGGATCAATGGGTTTGTTCTTGAGGGTGTGAAGCGTGCTGTTGCGGCCGAGTGTG |
| | GCTTGTCGGGTGATGCGGTCGCTTTCTTGCACGGTAGCGACCGTGAAGCGCTGGTGGAGTCTGCTAAGGCTTTGAAGGGTTTG |
| | ATCGACCATAGTAGTGGCTGCGCGGGTGTGCGCCGTCTTGCGGGGAGTGCCCCCGTTGATGATGTTAAACGACGTGAGGGTG |
| | TCGCGTTTGTGGATGCTCTTGTCAATAATTCTAGGAGATGATTTCTGATGGCTGACGATTTTCTTTCTGCAGGGAAGCTTGAGC |
| | TTCCTGGTTCTATGATTGGTGCGGTTCGTGACCGTGCTATCGATTCTGGTGTTTTGGCGAAGCTTTCGCCGGAGCAGCCGACTA |
| | TTTTTGGCCCTGTTAAGGGTGCCGTGTTTAGTGGTGTTCCTCGCGCTTAGATTGTTGGTGAGGGCGAGGTTAAGCCTTCCGCAT |
| | CGGTGGATGTTTCGGCGTTTACTGCTCAGCCTATCAAGGTTGTGACTCAGCAGCGTGTCTCGGACGAGTTTATGTGGGCTGAT |
| | GCTGATTACTGTCTGGGTGTGCTTCAGGATCTGATTTCCCCGGCTCTTGGTGCTTCGATTGGTCGCGCTGTTGATCTGATTGCT |
| | TTCCATGGTGTTGATCCGGCTACGGGTAAGCCTGCTGCTGCTGTCAAGGTGTCGCTTGATAAGACGACGAAGACGGTTGATGC |
| | CACGGATTCTGCTACGACCGATCTTGTTAAGGCTGTCGGCCTGATTGCGGGGGCTGGTTTGCAGGTTCCTAACGGTGTTGCTT |
| | TGGATCCGGCGTTCTCGTTTGCCCTGTCTACTGAGGTGTATCCGAAGGGGTCTCCGCTTGCCGGTCAGCCGATGTATCCTACC |
| | GCCGGGTTTGCTGGTTTGGATAATTGGCGTGGCCTGAATGTTGGTGCTTCTTCGACTGTTTCTGGTGCCCCTGAGATGTCGCCT |
| | GCCTCTGGTGTTAAGGCGATTGTTGGTGATTTCTCTCGTGTTCATTGGGGTTTCCAGCGTAACTTCCCGATCGAGCTTATCGAG |
| | TATGGTGACCCGGATCAGACTGGGCGTGACCTGAAGGGCCATAATGAGGTTATGGTTCGTGCCGAGGCTGTGCTGTATGTTG |
| | CGATTGAGTCGCTTGATTCGTTTGCCGTGGTGAAGGAGAAGGCTGCCCCGAAGCCTAATCCTCCGGCTGGAAACTGATTCATT |
| | TGTTGCGATAATGTTTATGCTGTGTGCAGGGGGTGGTGTTGATGGGTATCATTTTGAAGCCTGAGGATATTGAGCCTTTCGCC |
| | GATATTCCTAGAGAGAAGCTTGAGGCGATGATTGCCGATGTGGAGGCTGTAGCTGTCAGTGTCGCCCCCTGTATCGCTAAAC |
| | CGGATTTCAAATATAAGGATGCCGCTAAGGCTATTCTGCGCAGGGCCCTGTTGCGCTGGAATGATACCGGGGTTTCGGGTCA |
| | GGTGCAGTATGAGTCTGCGGGTCCTTTTGCTCAGACGACACGGTCTAATACTCCCACGAATTTGTTGTGGCCTTCTGAGATTG |
| | CTGCGTTGAAGAAGTTGTGTGAGGGTGATGGTGGGGCTGGTAAAGCGTTCACTATTACACCGACCATGAGGAGTAGTGTGAA |
| | TCATTCTGAGGTGTGTTCCACGGTGTGGGGTGAGGGTTGCTCGTGCGGGTCGAATATTAACGGCTACGCTGGCCCTTTGTGGG |
| | AGATACGATATGACCAGTTTTCCTTATGGTGAAACGGTTGTGATGCTTCAACCGACTGTTCGTGTCGATGATCTTGGTGACAA |
| | GGTGGAAGACTGGTCTAAGCCTGTCGAGACTGTGTACCATAACGTGGCCATCTATGCTTCCGTTTCGCAGGAGGATGAGGCT |
| | GCGGGGCGTAACTCTGACTATGAGTATTGGTCGATGCTTTTCAAGCAGTCTGTTGTTGGTGCTGATTATCGTTGCAGGTGGCG |
| | TATCCGGGGTGTTGTGTGGGAGGCTGACGGGTCTCCTATCGTGTGGCATCATCCAATGTCTGGCTGGGATGCGGGCACGCAG |
| | ATCAATGTGAAGCGTAAGAAGGGCTGATGGGTAGTGGCTCAGGATGTGAATGTGAAGCTGAACTTGCCGGGTATTCGTGAGG |
| | TGTTGAAGTCTTCTGGGGTGCAGGGCATGTTGGCTGAGCGTGGCGAGCGTGTCAAGCGTGCAGCCTCGGCGAATGTGGGCGG |
| | TAACGCTTTCGATAAGGCCCAATACCGTAATGGTTTGTCGTCAGAGGTGCAGGTTCACCGTGTTGAGGCTGTCGCTCGTATAG |
| | GCACCACATATAAGGGTGGGAAGCGTATTGAGGCGAAGCATGGCACGCTGGCTCGTTCGATTGGGGCTGCGTCGTGATCGTC |
| | TACGATGACCCCAGGAAGTGGGCTAAACGCGTGCTCAAGGATGATGGCTGGCTGTCTGGGATACCTTGTACTGGGACAGTGC |
| | CGGATAGTTTTGAGGGTGACCTTGTTTGGTTGGCTCTTGATGGTGGCCCGCAGTTGCATGTGCGTGAGCAGGTTTTTTTGCGG |
| | GTGAATGTGTTTTCTGATACGCCGGATCGGGCTATGTCTTTGGCGCGTCGTGTTGAGGCTGTTCTGGCTGACGGGGTTGATGG |
| | TGATCCGGTGGTGTTTTGTAGGCGTTCTACGGGTCCTGATCTTCTGGTTGATGGTGCACGTTTTGATGTGTATTCGCTTTTTGA |
| | GCTGGTGTGTCGGCCTGTCGAATCCGAGTAAGCGTATCGTTGTTTTTGTTGATTGATTTTTAGTTTGATTGTTTTTGGGGGTTA |
| | TGATGGCTGCAACACGTAAAGCGTCTAATGTTCGCTCTGCTGTTACGGGTGACGTCTATATTGGTAAAGCTCATGCCGGTGAC |
| | GCTATTGATGGTGTGAAGACGGTTCCTGAGGGGTTGACTGCTTTAGGGTATCTGTCTGATGACGGGTTTAAGATTAAGCCTGA |
| | GCGTAAAACGGATGATTTGAAGGCTTGGCAGAATGCGGATGTTGTTCGCACGGTGGCTACAGAGTCGTCTATCGGGATTTCTT |
| | TCCAGCTGATCGAGTCTAAGAAGGAGGTTATCGAGCTGTTTTGGCAGTCGAAGGTTACTGCCGGATCCGATTCGGGTTCGTTC |
| | GATATTTCTCCTGGTGCTACCACTGGCGTGCACGCTTTACTGATGGATATTGTGGATGGCGATCAGGTTATTCGCTACTATTTC |
| | CCTGAGGTTGAGTTGATCGATCGTGACGAGATTGAGGGTAAGAATGGCGAGGTGTATGGGTATGGTGTGACGTTGAAGGCGT |
| | ATCCTGCCCAGATTAATAAGAAGGGTGATGCGGTGTCTGGTCGGGGGTGGATGACGGCTTTAAAAGCTGATACCCCTCCGGT |
| | TCCTCCGAAGCCTCAGCCGAATCCGAATCCGCCGTCCGATAACTGATACACGATTTTAGGGGATTGTTGATAGATGAGTGAC |
| | GCTGGTTTCACATTGAAGATTGGTGACCGTAGCTGGGTGTTGGCGGATGCGGAGGAGACGGCTCAGGCTGTTCCTGCCCGCG |
| | TTTTCCGTCGTGCCGCCAGGATTGCCCAGTCTGGGGAGTCTGCGGATTTCGCCCAGGTTGAGGTGATGTTTTCCATGTTGGAG |
| | GCTGCCGCCCCGGCTGACGCGGTGGAGGCCCTGGAGGGGCTTCCTATGGTTCGTGTGGCGGAGGTTTTCCGTGAGTGGATGG |
| | AATACAAGCCTGAGGGTAAGGGTGCCTCTTTGGGGGAATAGTTTGGCTCCACGGCCTGATTGATGATTATCGTGGGGCCATC |
| | GAATACGATTTCCGCACTAAATTTGGTGTTTCTGTTTATAGTGTTGGTGGCCCGCAGATGTGTTGGGGTGAGGCTGTCCGGCT |
| | GGCTGGCGTGTTGTGTACCGATACGTCGAGCCAGTTGGCGGCCCACCTGAATGGTTAGCAGCGCCCGTTTGAGTGGTGCGAG |
| | TGGGCTGTGTTGGACATGCTGGATCATTACAGGTCTGCTAATAGTGAGGGGCAGCCGGAGCCTGTGGCGAGGCCTACGGATG |
| | AGCGTAGAGCCCGGTTTACGTCTGGGCAGGTGGACGATATTTTGGCGCGTGTTCGTGCCGGTGGCGGGGTGTCTCGCGAGAT |
| | TAATATTATGGGGTGAATAGTGTATGTCTGGTGAGATTGCTTCTGCATATGTGTCGTTGTATACGAAGATGCCCGGCCTTAAA |
| | AGTGATGTTGGTAAACAGCTTTCTGGGGTGATGCCTGCTGAGGGTCAGCGTTCGGGTAGTCTTTTTGCTAAGGGTATGAAGTT |
| | GGCGCTTGGTGGTGCCGCAATGGTGGGTGCCATCAATGTTGCCAAGAAGGGCCTCAGGTCTATCTATGATGTGACTATTGGTG |
| | GCGGTATAGCTAGGGCGATGGCTATTGATGAGGCTCAGGCTAAGTTGACTGGTTTGGGTCACACGTCTTCTGACACGTCTTCG |
| | ATTATGAATTCTGCTATTGAGGCTGTGACGGGTACGTCGTATGCGTTGGGTGATGCGGCGTCTACGGCTGCGGCGTTGTCTGC |
| | TTCGGGTGTGTAGTCTGGCGGGCAGATGACGGATGTGTTGAAGACTGTCGCGGTTGTGTCTTATATTTCGGGTAAGTCGTTTC |
| | AGGATACGGGCGCTATTTTTACGTCTGTGATGGCTCGCGGTAAGTTGCAGGGCGATGACATGTTGCAGCTTACGATGGCGGG |
| | TGTTCCTGTGCTGTCTCTGTTGGCTAGGCAGACGGGTAAAACGTCTGCTGAGGTGTCGCAGATGGTGTCGAAGGGGCAGATT |
| | GATTTTGCCACGTTTGCGGCTGCGATGAAGCTTGGCATGGGTGGTGCTGCGCGGGCGTCTGGTAAGACGTTTGAGGGCGCTAT |
| | GAAGAATGTTAAGGGCGCCCTGGGTTATCTTGGTGCTACGGCTATGGCGCCGTTTCTTAACGGGTTGCGGCAGATTTTTGTTG |
| | CGTTGAATCCGGTTGTCAAGTCGGTGACGGATTCTGTGAAGCCGATGTTTGCGTCGGTGGATCAGGGTATTCAGCGGATGATG |
| | CCGTCTATTTTGGCGTGGATTAACCGTATGCCGGGCATGATCACGAGAATGAATGCACAGATGCGCGCCAAGGTGGAGCAGC |
| | TGAAGGGCATTTTTGCAAGGTTGCATTTACCTGTCCCTAAAGTGAATTTGGGTGCCATGTTTGCTGGCGGCACCGCAGTGTTT |
| | GGTATTGTTGCTGCCGGTGTGGGGAAGCTTGTTGCAGGGTTTGCCCCGCTGGCGGTGGCGTTGAAGAATCTACTGCCGTCGTT |
| | TGGTGCTTTGAAGGGTGCCGCTGGCGGGCTTGGTGGCGTGTTTCGCGCTTTGGGTGGCCCTGTCGGTATTGTGATCGGCTTGT |
| | TTGCTGCCATGTTTGCCACTAACGCCCAGTTTCGTGCCGCGGTTATGCAGCTGGTTGGTGTGGTTGGTCAGGCTTTGGGCCAG |
| | ATTATGGCGGCTATTCAGCCGCTGTTTGGTTTGGTTGCCGGGGTTGTGGCACAGTTGGCGCCAGTGTTCGGCCAGATTATCGG |
| | TATGGTTGCGGGTTTGGCTGCCCAGCTGGTGCCTTTGATTAGTATGCTTGTCGCCCGGCTGGTTCCTGTGATCACGCAGATTAT |
| | TGGTGCGGTGACACAGGTTGCTGCAATGTTGTTGCCTGCGTTGATGCCGGTGTTGCAGGCGGATGTTGCTGTGATACGGCAGG |
| | TTGTTGCCGGTTTGGCTGTGGGGATCACCGGGAATGCCGGTTTGGCTTTGGATGCGATGTCGGGTGTGGCGGGTCGGCTGCCT |
| | GATGCGGTTGATGCCCGGTTTGGTGTGCGATCGTCGGTGGGCTCGTTTACCCCGTATGGCAGGTATCAGCGTGCTAAGGGTGA |
| | GAGTGTTGTGGTGAATGTGAATGGGCCTACTTATGGTGATCCTAACGAGTTTGCGAAGCGGGTTGAGCGGCAGCAGCGTGAC |
| | GCTTTGAACGCGTTGGCTTACGTGTGATTGGAGTGTTGTGCATGTTTATTCCTGACCCGTCTGATCGTTCTGGTTTGACTGTTA |
| | CCTGGTCTATGTTGCCATTGATTGGTAATGATCCGGAGCGTGTGCTTCATTTGACGGACTATACGGGTGCGTCTCCTGTCATGT |
| | TGTTGAATGATTCGTTGCGCGGCCTGGGTGTGCCCGAGGTGGAGCATTTTTCTCAAACTCATGTTGGGGTGCACGGCTCGGAG |
| | TGGCGCGGGTTTAATGTGAAGCCTCGCGAGGTGACATTACCTGTGTTGGTGTCGGGTGTTGACCCGGATCCGGTGGGCGGGTT |
| | TCGTGACGGTTTTTTGAAAGCCTATGACGAGTTGTGGTCTGCTTTTCCTCCGGGCGGGGAGGGGGAGTTGTCGGTGAAGACTC |
| | CTGCCGGTGTTGAGCGTGTGCTAAAATGCCGGTTTGATTCGGTGGATGACACGTTTACGGTGGATCCGGTTAATCGTGGCTAT |
| | GCGCGCTATCTGTTGCATTTGACAGCCTATGACCCGTTTTGGTATGGGGATGAGCAGAAGTTTCGTTTCAGTAACGCGAAGTT |
| | GCAGGATTGGTTGGGTGGCGGCCCTGTCGGCAAGGATGGCACGGCGTTTCCTGTGGTGTTAACACCGGGTGTTGGTTCAGGTT |
| | GGGATAATCTGTCTAATAAGGGTGATGTGCCTGCGTGGCCTGTGATTCGTGTCGAGGGCCCGTTGGAGTCGTGGTCTGTGCAG |
| | ATTGATGGTTTGCGTGTGTCTTCTGATTATCCTGTCGAGGAGTATGATTGGATCACTATTGATACGGATCCTCGCCAGCAGTC |
| | GGCGTTGTTGAACGGGTTTGAGGATGTGATGGATCGTTTGACAGAGTGGGAGTTTGCGCCTATCCCGCCTGGCGGTTCTAAGA |
| | GTGTGAATATTGAGATGGTTGGTTTGGGTGCCATTGTTGTGTCGGTGCAGTACAGGTTTTTGAGGGCTTGGTGAATAGTTGAT |
| | GGCTGGTCTTGTTCCGCATGTAACATTGTTTACGCCGGATTATCGCCGTGTGGCGCCTATCAATTTTTTTGAGTCGTTGAAATT |
| | GTCGTTGAAGTGGAATGGTTTGTCGACGCTGGAGTTGGTGGTGTCGGGTGATCATTCTAGGCTTGACGGGTTGACTAGGCCGG |
| | GTGCACGGCTGGTTGTTGATTATGGTGGTGGCCAGATTTTTTCTGGGCCTGTGCGTCGGGTTCATGGTGTGGGTCCGTGGCGT |
| | TCTTCGCGGGTGACTATCACGTGTGAGGATGATATCCGCCTGTTGTGGCGTATGCTGATGTGGCCTGTGAATTATCGTCCCGG |
| | TTTGGTGGGTTCGGAGTGGCGTGCTGACAGGGATTATGCCCACTATTCGGGTGCGGCTGAGTCGGTGGCTAAGCAGGTGTTG |
| | GGGGATAAGGCTTGGCGTTTTCCTCCGGGTTTGTTTATGAACGATGATGAGAGTCGTGGCCGCTATATTAAGGATTTTCAGGT |
| | GCGGTTTCACGTGTTTGCCGATAAACTGTTGCCTGTCCTGTCGTGGGCTCGGATGACTGTCACGGTGAACCAGTTTGAGAATG |
| | AGAAGTTTGATCAGCGTGGTTTAGTGTTTGATTGTGTGCCGGCGGTGACCCGGAAGCATGTGTTGACTGCCGAGTCTGGTTCG |
| | ATTGTGTCGTGGGAGTATGTGCGTGACGCCCCGAAGGCGACATCTGTGGTTGTGGGTGGCCGCGGCGAGGGCCGGGATCGGC |
| | TGTTTTGTGAGGATGTTGATTCGATGGCCGAGGATGACTGGTTTGATCGTGTCGAGGTGTTTAAGGATGCCCGTAACACGGAT |
| | TCTGAACATGTGCATCTTATTGATGAGGCTGAGCGGGTGTCAGGGGAGTCTGGGGCCACGTCGGGGTTTAAGATCGAGTTGG |
| | CGGAGTCGGATGTGTTGCGGTTTGGGCCCGGCAATCTGATGCCAGGGGATTTGATCTATGTGGATGTGGGCTCGGGTCCTATT |
| | GCGGAGATTGTGCGGCAGATTGATGTGGAGTGTGTATCGCCGGGTGACGGCTGGACGAAGGTGACTCCTATTGCGGGGGATT |
| | ATGAGGATAATCCGTCGGCGTTGCTAGCACGGCGTGTTGCTGGTTTGGCTGCGGGTGTGCGGTATTTGCAAAAATTCTAAAAA |
| | GATTAGGGGTTTGTTGTGGGTATTGTGTGTAAAGGGTTTGATGGTGTGTTGACCGAGTATGATTGGGCTCAAATGTCTGGTCT |
| | GATGGGTAATATGCCGTCTGTGAAGGGGCCGGACGATTTTCGTGTGGGTACTACTGTTCAGGGTGCCACGGTGTTGTGTGAG |
| | GTTTTTCCGGGGCAGGCTTGGGCTCACGGGGTGATGTGCACTTCTAGTAGTGTTGAGACGGTGACAGGGCAGCTGCCTGGCC |
| | CCGGTGAGACCCGATACGACTATGTGGTGTTGTCTCGGGATTGGGAGCAGAACACAGCCAAGTTGGAGATTGTTCAGGGTGG |
| | CCGTGCGGAGCGTGCCCGTGACGTGTTGAGGGCCGAGCCTGGCGTGTTCCATCAGCAACTGTTGGCTACCCTGGTGGTGTCGT |
| | CTAACGGGTTGCAGCAGCAGCTTGACAGGCGTGCTATAGCTGCCCGTGTGGCGTTTGGGGAGTCTGCTGCGTGTGACCCGAC |
| | CCCTGTGGAGGGTGACCGTGTGATGGTTCCTTCTGGGGCTGTGTGGGCTAACCATTCGGGCGAGTGGATGCTACTGTCTCCGA |
| | GGATTGAGACGGGCACTAAGCAGATCATGTTTGGCGGGTCTGCTGTGTATGCTTACACGATCCCGTTTGAGCGGCCGTTCGGT |
| | GCTCCGCCGGTTGTGGTGGCGTCTATGGCTACGGCGGCTGGGGGTACGACACAGATTGATGTGAAAGCCTACAATATTACTA |
| | ATAGTAATTTTAGTTTGGCTTTTATTACGAATGACGGGTCTAAGCCTTCTGGTGTGCCTGCGATAGCTAACTGGATTGCTGTCG |
| | GCGTGTGACCGGGCTGTTGTTGTGGCGGATGGTGTGATGTCGGGGGGCTGTGGTGTCGTGGTTTACTCCTGCACTGGTGGCCT |
| | CTATCTGTACCGCATTGGCCACGGTTTTGGGTTCGGTTCAGGCTGCCACATCTAAATCTCGGAAGCGTTTGCGGCGGCTGTCG |
| | GCTCAGGTAGATGCGATGGAAGAGTATACGTGGTGTGTGCGGCGCGAGGTGCGCCAGTTTAACGCCCGGCTTCCTGACAGGG |
| | TTGATCCGATTGTTTTGCCTGAGTTGCCTAGTTTCCTGTCGGACACGTTGGGGGGTGAATGATGAGGGAGTTGGAGGAGGAG |
| | AAGCGGCAGCGCCGCAATTTTGAGAAGTTTTCACTGGTGTTGCTGTTTTTGTCGCTTGTGTTGTTGGCGGTGGTTGCCGGGGG |
| | TGCTTTGCGTTTCGGGGCTGTATCCTCTGAGCGGGATTCGGAGCAGGCGAGGGCCCAGTCTAATGGTACAGCGGCTAAAGGG |
| | TTGGCTAGCAGTGTGAAGCGGGTGTGTGCTTCGGGTGGGCGGGAGTCGGTGCGTCTTCACCAGTCTGGTTTGTGTGTGGATGC |
| | TGTGCGTGTTGAGCGTAGCGTGCAGGGTGTGCCGGGTCCTGCCGGTGAGCGCGGCCCGCAAGGGCCTGCAGGTGCTGATGGG |
| | CGTGATGGTGTTAATGGTTCGGCTGGGCTGGTTGGCCCTGTTGGTCCGCAGGGTTCTCCTGGTTTGAATGGTGTGAAAGGTCC |
| | TGACGGGTTGCCTGGTGTGAATGGGTCGGATGGCCGTGATGGTGTTCCAGGCCGTGCAGGTGCTGACGGTGTGAACGGCGTT |
| | GATGGCACTGCTGGTCGGGATGGTTCGGCCGGTGAGCGCGGTGATGTGGGCCCTTCAGGTCCTGCCGGCCCGCAAGGTGCAC |
| | AGGGTGAACGGGGTGAGCGCGGCCCCGCCGGTGCGAACGGATCCGATGGTAAAGATGGTAAGGATGGCCGTTCTGTTGCGT |
| | CTGTGTACTGTTCCGGGGGCCGCCTTGTTGTGAAATATAGTGACGGTGTGGCTTCTACAATATCGGGCTCGGTGGCCTGCCAG |
| | GGTGTGAAACCGTCGCCTATAGTGACTATATCATCCCACAAATAGAAAGGAGTGGCTGTGATGGTAGTGTTTGGTGGTGGTG |
| | TGTGGTGAGGTTTATTCCTGCAGCACATCACTCGGCCGGCTCGAATAGTCCGGTGAACAGGGTTGTGATTCATGCGACGTGCC |
| | CGGATGTGGGGTTTCCGTCTGCCTCCCGTAAAGGGCGGGCGGTGTCCACGGCAAACTATTTCGTGTCCCCATCGTCTGGTGGT |
| | TCGGCGCATTATGTTTGCGATATTGGGGAGACGGTGCAGTGCTTGTCGGAGTCTACGATTGGGTGGCATGCCCCGCCGAATCC |
| | GCATAGTTTGGGTATAGAGGTTTGCGCAGATGGCGGTTCGCACGCCTCGTTCCGGGTGCCAGGGCATGCTTACACTCGTGAGC |
| | AGTGGCTGGATCCTCGGGTGTGGCCCGCGGTGGAAAGAGCGGCGGTGCTGTGCCGGCAGTTGTGTGACAAGCATGGTGTTCC |
| | GAAGAGGAAACTGTCTGTGGCTGATTTGAAGGCTGGCAGGCGGGGCATCTGCGGGCACACTGATGTGACGGATGCGTGGCAT |
| | CAGTCGGATCATGACGATCCGGGGCCGTGGTTTCCGTGGGACAGGTTTATGGCCGTCGTGAACGGCGGCAGTGGAGAGAGTG |
| | AGGAGTTAACGGTGGCTGATGTGAAAGCCTTGCGTGATCAGATTAAACAATTGTCTGCTCAGCTTACTGGTTCGGTGAATAA |
| | GCTGCATCACGATGTTGGTGTGGTTCAGGTGCAGAATGGTGACTTGCGTAAGCGTGTCGAGGCTTTGTCGTGGGTGAAGAAT |
| | CCTGTGACGGGGAAGCTGTGGCGCACTAAGGATGCTTTGTGGAGTGTCTGGTATTACGTGTTGGAGTGTCGTAGCCGTATTGA |
| | CAGGCTCGAGTCTGCTGTTAACGGTTTGAAAAAGTAATGGTGGTTTGTTGTGGGTAAACAGTTTTGGTTAGGTTTACTGGAGC |
| | GGGCGGCTAAGACTTTTGTGCAAACGTTTGTTGCGGTGTTGGGGGTGACGGCGGGTGTCACGTATACTGCGGAGTCGTTTCGC |
| | GGTTTGCCGTGGGAGTCTGCCCTGATAACAGCAACGGTGGCTGCGGTGTTGTCGGTTGCTACATCGTTTGGTAGCCCGTCGTT |
| | TGTGGCTGGGAAACCTAAAACCACGGTTGTGGATGCGGGTTTGGTTCCGCCCGATGACGGGGGCATGGTTGAGCCGCACATG |
| | GGGGATGTGTCGGATCCTGGCATGATTGAGCCTGCAGATGATGTGTATGGTTTTGCCGGCTATGTGCCTCGGCGTGCAGCCGA |
| | GTCTGAGGTTGGCACGGTAGAGTCTACTGTTGCATAATTGAATATGTGTGTGCCCCAGCGGTGCTGCCACGATCGTGTGGTGG |
| | CTGCTGCTGGGGCACTATTTTTGTGTCTATAGTATTCTATGATTCGTTATTGTTGATGGTTTCCTCAAGCATCTGGTGCAGGTG |
| | GAGGCAGGCTGAGATAGTATCGTTGGCCTGGTCTAGAACATCCTGGCCGATAACGCCTTCGTGGTTGTCGCGGTGGTAGAGG |
| | ATGGACTGCATGATATCGTCGGCCTCCGCTTGCAGTAGTTTTGCCTGGTATGCGATTCTGGCGAGCCAGTCTATGGCTTCATG |
| | GCTTGCCTGTGTGTCGTCCGGCATGCCATGGGTGTTGCTGTTGTTTGTGGGGTGTCCTGCACTGTCGCAGTCCCACAGGATTTC |
| | GCTGCACTCGTCTAGCGTGTCCTGGTCGATGTCGAGATCGTCGAGGCTGACTCCTTTGACGGTGAGGTTCACATCATCGAGGG |
| | AGATGGGTACATGGTACTGGTTTTCGATACCGGCAACAATGTTTTCCAACTGTTGCATGTTGGTGGGTTGTTGTTGGACGATA |
| | CGGTGTACTACTGTTTTGAGGGCAGTGTAGGGGATATTGGTTGTGTTGTCCATCGTGTTATGCCATTCCTTCGTTATCGTCTGG |
| | CATGTAGTATGTGCTGTTTGCGTACTCGGATAACGTCATCAGTGTTTGGTCTGCCCACTGTTTCACGGTTTGTCTTGTCACCCC |
| | GAGTCGTTGGGCGGCCGACGCATATGTTTGGTCATACCCGTATACTTCACGGAAGGCTGCCAGGCGGGCTAGCCGTTTGCGCT |
| | GTTTGGAGGGTTCACATGTGAGGGTGTAGTCGTCTATCGCTAATTGTAGGTCGATCATGGTGGCAATGTTGTTGCCGTGGTGT |
| | TGTGGCGCGGTTGGTGGTGGTGGCATGCCCGGCTCCACACTGGGTTTCCATGGGCCGCCGTTCCAGATCCATTGGGCGGCTTG |
| | GATGATGTCGGCGGTGGTGTAGGTTCGGGTCATGTGTCACCCCTGGAACAGGTTGTCGAGGTTGTCTGGCTGGCTGGTGGTGT |
| | CGAATCGTCCGACGCAGTGGCAGTAGTCGTACATGAGTTTGATGATGTGTTGGTGGTCTCCCAAATAGGTGTTGCCGCTGATA |
| | CTGTAGGTGGCTGTGCCGTCTTTGCTGATGGTGTATTTGGCGGTGATGGTTTCGGGGTTTTCTGTGTTGGTGATGATTGCTGTG |
| | GTGGTGGCGCCTACTGTTTGGAGTATGGTGGTTTGGGTTCCGTCGTCGAGGATGGTTGTGACCATTGTGGTTCTCCTTAGTTGC |
| | TGGTTTGGTTGTCGGCTATGGCTGTGATTTCTTGGACGGGTTTGGGTAGGTCTAGGTGGTGGACTGTTTTGTTTGCTAGTCGTT |
| | GGGCGACACGGTAGCACATTTGGGTCCACTGGTTGCCTGTGAGTTGGTGGTATTGGTTGCGTACCGCAATATATAGTAGAGA |
| | GTCTCGGTACAGGTCGTCTGGGNTGACAGCCGGGTAGCGGCGGGCNATATTGGTGCAGGCTTTGTGTAGCTGGTGTTGGTGG |
| | TGGGGGGTTGCCCATTCCCAATCAGCTGTGGTGGCTAGGTCTGCTTTTGTTGGTCGTCTACTCATGGTTTTTATCTGGCTATCT |
| | GGTAGTTGTTTGGTGTTTTGTTGTTGATAGTGTAGCACACGAGTCCGGGGTTGCCGTTGGTGCCCGTCTTGTGCAGGTACCAG |
| | ACGGATTCTCCTTCCATGGATGGGCGTTGGATGAAGGTGCGTTGTCCTTGCTCGGATATTTCGAGGTGGTGCCGGTGTCCGGC |
| | CATGAGTATATGGGATACGGTGCCGTTGTGGAATTCTTGGCCGCGCCACCATTCGTAGTGTTGGTTGTTGCGCCATTGGTGTC |
| | CGTGGGCGTGCAGGATGGTAGCCCCGGCTACGTTGACGGTGGTGGTCATTTCGTCTCGGCTGGGGAAGTGGAAGTGAAGGTT |
| | GGGGTATTGGTTGTTGAGCTGGTAGGCTTCTGCGATGGCCCGGCAGCAGTCCACTTCGAAACTATCGTCGTAGGTGGTGACTC |
| | CTTTACCGAAGCGCACGGCTTCTCCGTGGTTGCCGGGGATGGATGTGACGGTCACATTTTGGCAGTGGTCGAATTGGTGGATG |
| | AGTTGCATCATGGCCATGCGGGTGAGCCTGATTTGTTCCGTCAAGGGTGTTTGTGTGCGCCAGGCGTTGTTGCCGCCTTGTGA |
| | CACGTATCCTTCGATCATGTCGCCGAGGAAGGCTATGTGGACTCGTTGCGGCTGGCCTGCTTGCTGCCAGTAGTGTTTAGCTG |
| | AGGCGAGGGAGTGTAGGTAGTCGTCGGCGAAGTGTGCTGTTTCTCCTCCGGGGATGCCTTTGCCGATTTGGAAGTCGCCTGCC |
| | CCGATGACGAAGGCCGCATCGCTGCTACGGGTGTCGGACTGTTTGGGGGGTGTCCATTCGGCTAGTTTATCGACGAGTTCGTC |
| | TACAGGGTAGGGGTCGGTTGCGGGTTGGTGGTCGATGATTTTTTGTATGGATCGGCCTGTTTCTCCGTTGGGTAGGGTCCATT |
| | CGGAGATGCGTGTGCGGCGTACGGTTCCGTTGGCGAGATCATCGCGGATGGTGTCTGCTTCGTTGTCGTGGTTGGCTAGCTGG |
| | GTGAGGAGCCGGTCTATGTTGTCTATCATCGGGTATCCTCTTCCTTTTGTGGAGTGGTGTTGGCTTGTTTGCGGCGATAGTCTT |
| | TGATGACGGTGGCGGAGATGGGGTATCCGGCTTGGGTGAGTTGTTTTGCTAGCCAGGATGCGGGTATAGACCTGTCGGCGAG |
| | GACGTTTGCGGCTTTGCGGCCGTAGCGTTGGATCAACGTTTCAGTTTTGGTTGCCATGATGTCCTAGGGGTTGTGTGGTGGGC |
| | TGCCATCCTGTGCGGCAGTCGCCGTCGTGTCCTGGTTTGCGTGTGCACCACGATGTTGTTCCGTCTGTGTGGTTGAGTGTTTTG |
| | CCGCACATGACGTTTTGTAGATGCTCCGGCAGCTCGCTATTGCTATCGTCTTGCTCGTCTAGCAAAGTTTTTTGTTGGGTGAAA |
| | AACTCGGACACGGTGCCGTTGTGGACTGGGAGTGTCCATGTTTTCCATTGTTGTTGTAGTCGGGTGTTCCAGTGGAATTGTTT |
| | GGCGGCGTTTTCTGCCTGTTTTATGGTTTTGTAGTAGCCGACGAGTATGCGCTGGTGTTGCTGGTCGGGCGGGTTTTGGCCTCG |
| | CCAGTATTGTGCCGCGACGGCGTACCGGTTGTTGTCGGTGAAGGTGTTCCAGCAGTATTGGATGATGTTGTTGAGGGTGTCAT |
| | CTGGCAGATCGTCTGGGTTGAGGTTGGTGGCCTGGGTGAGGATGTCTCGGATGGTTTGAAGGTTGCGTTTTGTGGGTTTGAAC |
| | GAGATGCTCACGATAGTGCCGGCTGTTCGTCTTGCATGAACTGGTTGAAGGTGTTGTTCCCGGCGTGTTGGGCTTGTGTGATT |
| | TGCTGGTCGGTCCAGTCGGGGTGTTGCTGTTTCAGATAATACCAGTGGCTCGCATTGTAGGTTTCGTTTTGTAGCCGTGTGAG |
| | ATGGTTTTCTTCGATGATTTGTTTCCACATGGTCCATGACACGTCGAGCCGGTTGAGGATTTCGAGGGCTGGGATGTTAAACT |
| | GGTCGAGGAAGAGGATTTCGTGGGTGTAGTAGTTTTTCTCGTAGGCGTCCCATCCGCTTCGGTGCCTGTTGGGCTGGTTTTGG |
| | GGTAGGCTTCCCGGCAGATTTTGTGTAACCGTTTGGCCATGTCGTCGGGTAGTTTAATGTCGGGGTTGGCGCGGATCATGGAT |
| | CGCATCCCATCATAGGTGGTGCCCCAGGTGTGCATGATGTAGGTGGGGTCTTCGCCATCAGCCCATTTCTCTGCACAGATGGC |
| | GAGGCGGATGCGCCTCCTGGCTGTTTGGCTGGTGTTGCGCCGGTTGGGGATGGGGCACGTGTCGAGGGGATCCATGATGTTTT |
| | AGTTTACCTTTCTGGTTTCGTGTTGTTGACGTGTTTTACTGTAGCACAGTGTCTAGTGCTTGTGTCAACCCTGTTTTTCCGGCCT |
| | GCAGGTAGGTGTCTGTGACATCCCCGACAGTGAGGGGCACATGGGTGGCTTGCGGTAATGCTTGGGTTAGGGTTTGGGCCAT |
| | CTTGTCTCCCGCGGGGTCTGGGTCGGACCAGATGTAGATGTGGTCATAGCCTACAAAAAATTTGGTCCAAAAAGTTTGCCAC |
| | GAGGTTGCGCCGGGTAGGGCAACGGCCGACCATCCGCATTGTTCGAGGATCATGGAGTCGAATTCGCCTTCGCAAATGTGCA |
| | TTTCGGATGCCGGGTTGGCCATGGCGGCCATGTTGTAGATGGAGCCTGTGTCTCCTGCCGGGGTTAGGTATTTGGGGTGGTTG |
| | TGGGTTTTGCAGTCGTGCTGGAGTGAGCAGCGGAAACGCATTTTTCTTATTTCGGCTGGGCCGCCCCAAACGGGGTACATGTA |
| | TGGGTTGGTGATGCGCTGGTTGTAGTTTTCGTGGCCGGGTATGGGGTCATTGTCGATGTATCCAAGGTGGTGGTAGCAGGCTG |
| | TTTCTTCGCTGATGCCTCTTGCTGAGAGCAGGTCGAGTATGTTTTCGAGGTGGGTTTCGTAGAGGGCCGAGGCTTTCTGGATT |
| | CGGCGGCGTTCCGCAATGTTGTATGGGCGTATACTGTCGTACATTCGGGTTTTCTTCTTCTAATCGTTGTTGTAGCTTGGCAAG |
| | TCCGCCTCCGACACCGCATGTGTGGCAGTACCAGACGCCCTTGTCGAGGTTGATGCTCATGGAGGGCTGGTGGTCGTCGTGG |
| | AACGGGCAGAGGATGTGTTGCTCGTTCTTGGATGGGTTGTACCGTATGTGGTAGGTGTCGAGGAGGCGGCAGGTGTCAGAGG |
| | TGTGGGAGGAGTTCTGTGAGGGTTGATACCACATAGGCTTCGCTCCATGGCTTGTTGCGCTGTTTCATGACGACGAGGCCGAT |
| | GGTGGACTGGTTTTCGCGGTTTCGGTGGGTTTCGTAGTTGCGTGCCTCAAGGGTTGCTTCTTTGACGAATTGGGCGAGGTGTG |
| | GCTGTCCTGCTTTCGCTTCAATCACGTATGTGTGGTTTTTGGTTTTGAGGATGAGGTCGCCTTCGTCTTCGCGGCCGTTGAGGT |
| | GGAGGCGTTCTATATCGTGGCCGGTGTCGCGTAGCTGGTGCAATAATCGTGTTTCCCATTCGGCGCCTGCCCGCCGGTTTCTT |
| | GATTGTTGTGAAGCCATCATAGTCCTTTGTGTGTTGTGGTCATGTTCCATGGCTGTTTTTCGGCGAGGGGTCCGAAGAATGTGT |
| | ATTCGGGGTAGGCTCGTAGCCGCTCGTATCGGGTGCCGTCGGGGCTTGACTGTCCGGTGCGCTGTTTGAGTACGGCGATGCGT |
| | GCCTCTGCCGGTATCGTGAGGCCGTTGCCATTATCCTCGCCACCATACAATGAGACTCCGAGGATGAGTTGTGGTTTTTCGGA |
| | GAGCCCGTTTTTGATTTCCCGCCTAGCCGGGGGGTGTTCGATGTCGGC |

[0066] Provided are nonwoven polymer fabrics for use in a personal care product. The nonwoven polymer fabric comprises a phage combination attached to a polymer fabric, wherein the phage combination comprises one or more sets of phages that infect one or more bacterial species. The one or more bacterial species are selected from a population of microorganisms comprising Staphylococcus aureus, Staphylococcus argenteus, Streptococcus pyogenes, Streptococcus pneumoniae, Escherichia coli, Enterococcus faecalis, Cutibacterium acnes, Corynebacterium tuberculostearicum, or combinations thereof. The personal care product, for example, is a facemask, a surgical facemask, a sanitary pad, a tampon, a baby diaper, or adult incontinence products.

[0067] In some embodiments, the personal care product is a surgical facemask with an inner sheet made from nonwoven fabrics such as polypropylene, a rayon/polyester blend, or polycaprolactone (PCL). Facemasks abrade the face and increase moisture and temperature on the skin. Bacteria including Staphylococcus aureus, Staphylococcus argenteus and Cutibacterium acnes proliferate on the interior surface of facemasks as well as on the surface of the skin. Proliferating bacteria and irritated, moist skin promotes the development of folliculitis, called maskne, a portmanteau of mask and acne. To reduce the proliferation of S. aureus/argenteus and C. acnes, phages that infect those species are attached to the nonwoven fabric by the following method. The surface of the nonwoven fabric is activated by imparting a positive charge via surface plasma treatment or corona discharge treatment. Phages are attached to the activated surface of the nonwoven fabric by spraying, misting, printing, or immersing the fabric in a low-salt buffer (salts at concentration less than 50 mM) containing at least 109 PFU/mL (PFU=plaque forming units). The naturally negatively charged capsids of the phages attach to the charged, activated surface of the nonwoven fabric, leaving the positively charged phage tail prone to infect and kill bacteria that contact the surface of the nonwoven fabric incorporated into the facemask (See FIG. 1). Alternatively, phages may be covalently bonded to the nonwoven polypropylene or rayon/polyester fabric via surface activation chemistry such as EDC/NHS chemistry or acidic surface activation that enables amine groups on amino acid side-chains on the phage capsid to covalently bond to activated carboxyl groups on the polymer surface.

[0068] In some embodiments, the nonwoven polymer fabric is used in a diaper for adult incontinence with a topsheet made from nonwoven fabrics such as curled-fiber cellulose fiber, polyester fiber, polyethylene fiber, nylon fiber, polypropylene fiber, polylactic acid fiber, polyhydroxyalkanoate fiber, polyethylene terephthalate fiber, polypropylene carbonate fiber, or mixtures of the different fibers. When urine is absorbed by the diaper and held against the skin, it increases moisture and pH, reduces the natural moisture barrier of the skin, causes redness, broken skin, and sometimes bleeding. Bacteria such as Enterococcus species and Escherichia coli proliferate and exacerbate incontinence associated dermatitis (IAD). To reduce proliferation of bacteria associated with IAD, phages that target the Enterococcus species and E. coli will be attached to the nonwoven polymer topsheet of the diaper in a similar fashion as in the case of the surgical facemask, activating the surface by imparting a charge to bind to the negatively charged phage capsid or creating active sites for covalently bonding the phage capsid.

[0069] The nonwoven polymer fabric can be used in a baby diaper with a topsheet made from nonwoven fabrics such as polyester fiber, polyethylene fiber, polypropylene fiber, rayon/viscose fiber, polylactic acid fiber, acrylics, olefins, polyhydroxyalkanoate fiber, polyethylene terephthalate fiber, polypropylene carbonate fiber, or mixtures of the different fibers. Diaper dermatitis (DD) in babies is strongly associated with Candida albicans, Staphylococcus aureus/argenteus, and Enterococcus species. S. aureus/argenteus in particular produces an exfoliative toxin that can exacerbate DD and shows a strong statistical correlation with DD. Phage that infect S. aureus/argenteus and Enterococcus species can be attached to the nonwoven polymer topsheet of the diaper in a similar fashion to the surgical facemask.

[0070] The nonwoven polymer fabric can be used in a sanitary pad with a topsheet made from nonwoven fabrics such as polypropylene fiber, polyethylene fiber, polyethylene/polypropylene fiber, polylactic acid fiber, polyhydroxyalkanoate fiber, polyethylene terephthalate fiber, polypropylene carbonate fiber, or mixtures of the different fibers. Pad rash is an unpleasant but non-life-threatening complication of wearing sanitary pads. The sensitive skin around the vagina becomes inflamed due to friction from the pad, increased moisture, pH, and temperature. Skin occlusion also generally promotes the proliferation of bacteria on the surface of the skin that can contribute to pad rash. Less often, but more critically, sanitary pads can promote the growth of Staphylococcus aureus, Staphylococcus argenteus or Streptococcus species, which enter the vagina and can reach the bloodstream. If they reach the bloodstream, they may cause Device-Associated Menstrual Toxic Shock Syndrome, which is life-threatening. Phage that infect S. aureus/argenteus and Streptococcus species can be attached to the nonwoven polymer topsheet of the sanitary pad in a similar fashion to the surgical facemask. The phage-functionalized topsheet prevents proliferation of S. aureus/argenteus and Streptococcus species in the pad and on the surface of the skin, thus reducing the occurrence of pad rash and Device-Associated Menstrual Toxic Shock Syndrome.

[0071] In some embodiments, the nonwoven polymer fabric is used in a tampon with a topsheet made from nonwoven fabrics such as polypropylene fiber, polyhydroxyalkanoate fiber, polyethylene fiber, polyethylene terephthalate fiber, polylactic acid fiber, polypropylene carbonate fiber, or mixtures of the different fibers. Tampons can promote the growth of Staphylococcus aureus, Staphylococcus argenteus or Streptococcus species when not changed after 4-8 hours. The bacteria can reach the bloodstream. If they reach the bloodstream, they may cause Device-Associated Menstrual Toxic Shock Syndrome, which is life-threatening. Phage that infect S. aureus, S. argenteus and Streptococcus species can be attached to the nonwoven polymer topsheet of the sanitary pad in a similar fashion to the surgical facemask. The phage-functionalized topsheet prevents proliferation of S. aureus/argenteus and Streptococcus species in the pad and on the surface of the skin, thus reducing the occurrence of Device-Associated Menstrual Toxic Shock Syndrome.

[0072] Phage isolates used in formulating phage-functional activated polymer fabric (e.g., nonwoven fabric) surfaces are provided in Table 1.

### 6.2.1. Formulation

[0073] Bacteriophage formulations have been described in WO2022198091A1, which is incorporated by reference herein in its entirety. The bacteriophage formulations or mixtures may comprise at least one bacteriophage capable of lysing a microorganism (e.g., bacteria) or inhibiting growth of a microorganism, e.g., a microorganism found in a biological sample (e.g., skin, gut, mouth) that is obtained from a subject, and may be useful, in some instances, in treating a health condition (e.g., skin condition or disorder). A method may comprise determining or identifying a microorganism in the sample (e.g., identifying a host bacterium) and generating a bacteriophage mixture or formulation comprising at least one bacteriophage capable of infecting the microorganism. The bacteriophage mixture or formulation may be administered to the subject from which the sample was obtained. Accordingly, the methods provided herein may be useful in generating personalized formulations or mixtures to treat individual health conditions. In some instances, the bacteriophage mixture or formulation comprises at least two different bacteriophages, which may have the same or different host ranges. Such a combination of bacteriophages with a designated host range may aid in prevention of bacterial or microbial resistance.

[0074] The present disclosure also provides formulations for incorporating a bacteriophage or bacteriophage mixture, e.g., to a personal care product. A formulation may comprise a cosmetic formulation of skincare formulation. The formulation may comprise any useful ingredients or compositions, such as an excipient that is configured to stabilize the one or more bacteriophages (e.g., maintain a percentage of viability of the one or more bacteriophages for a duration of time, e.g., at least one week). The excipient may comprise a substance for bulking up a solid, liquid, or gel formulation comprising the one or more bacteriophages. In some cases, the substance may confer a therapeutic enhancement to the one or more bacteriophages, e.g., by enhancing solubility, decreasing or increasing dissolution, enhancing stability, increasing penetration into the skin or portion thereof (e.g., the stratum corneum), increasing bacteriophage activity, etc. In some instances, the excipient may comprise one or more liposomes or lipophilic moieties (e.g., micelles, vesicles), which may encapsulate the one or more bacteriophages. The excipient or a substance of the excipient may be used to change a property of the composition, such as the viscosity. The substance may be used to change a property of the therapeutic agent, e.g., bioavailability, absorption, hydrophilicity, hydrophobicity, pharmacokinetics, etc. The excipient may comprise a binding agent, anti-adherent agent, a coating, a disintegrant, a glidant (e.g., silica gel, talc, magnesium carbonate), a lubricant, a preservative, a sorbent, a sweetener, a vehicle, or a combination thereof. For instance, the excipient may comprise a powder, a mineral, a metal, a sugar (e.g. saccharide or polysaccharide), a sugar alcohol, a naturally occurring polymer (e.g., cellulose, methylcellulose) synthetic polymer (e.g., polyethylene glycol or polyvinylpyrrolidone), an alcohol, a thickening agent, a starch, a macromolecule (e.g., lipid, protein, carbohydrate, nucleic acid molecule), etc.

[0075] The formulation may comprise additional components for treating a skin condition (e.g., aging, acne). For example, the formulation may comprise one or more anti-aging ingredients, including but not limited to: retinoids (vitamin A derivatives), niacinamide (vitamin B3), ascorbic acid (vitamin C), skin-active peptides, proteins or peptides (e.g., collagen, hyaluronic acid, or derivatives thereof), plant growth factors, e.g., kinetin, ubiquinone (coenzyme Q10), etc. Alternatively or in addition to, the formulation may comprise one or more anti-inflammatory agents, e.g., anti-histamines, salicylates, and the like. In some instances, the formulation may comprise one or more anti-acne agents, such as benzoyl peroxide, salicylic acid, probiotics, antibiotics, antifungals, etc.

[0076] In some embodiments, the composition contains one or more bacteriophages formulated in a mixture. In some embodiments, the composition is formulated in a liquid, semi-liquid, solid, semi-solid, or powder form. In some embodiments, the composition is formulated for attaching the phages to surface-active nonwoven fabrics and is integrated into disposable personal care products. In some embodiments, the composition is formulated in a liquid for applying the composition onto surface-active non-woven fabrics.

[0077] In some embodiments, the composition contains one or more bacteriophages formulated in a culture medium (e.g., a cocktail of bacteriophages).

[0078] Polymer fabrics with phage combination as described herein alone or incorporated on personal care products may be maintained, stored, or shipped in a culture having a pH value between 1-14. Suitable pH values are about pH 1, pH 2, pH 3, pH 4, pH 5, pH 6, pH 7, pH 8, pH 9, pH 10, pH 11, pH 12, pH 13, or pH 14. As an example, the pH value may be an acidic pH or lower than pH 7 (e.g., pH 6.9, pH 6.5, pH 6, pH 5, pH 4, pH 3, pH 2, pH 1). As another example, the pH value may be an alkaline pH or higher than pH 7 (e.g., pH 7.1, pH 7.5, pH 8, pH 9, pH 10, pH 11, pH 12, pH 13, or pH 14). As yet another example, the pH value may be close to neutral (e.g., about pH 7, about pH 6-pH 8).

[0079] Polymer fabrics attached with phage combination as described herein or personal care products incorporated with the phage combination or the phage cocktail can be packaged, stored, or shipped at about 4° C. to about 100° C., about 10° C. to about 80° C., about 15° C. to about 60° C., about 20° C. to about 40° C., or about 25° C. to about 35° C. In some embodiments, the personal care product incorporated with the bacteriophages or the bacteriophage cocktail is packaged, stored, or shipped at a temperature no more than 100° C., 90° C., 80° C., 70° C., 60° C., 50° C., 40° C., 30° C., 20° C., 10° C., or 4° C. In some embodiments, the personal care product incorporated with the bacteriophages or the bacteriophage cocktail is packaged, stored, or shipped at room temperature.

### 6.2.2. Polymer Fabrics

[0080] In some embodiments, the polymer fabric is a polymer matrix. As used herein, the term “polymer matrix” means a polymer which undergoes a physicochemical change in response to a compound produced or released by the infection of a microorganism by a phage. The polymer may be degradable or non-degradable. Suitable polymers include, but are not limited to, polylactic acid, polycaprolactones, PHA, and PHB. The polymer matrix may comprise one polymer, or a combination of polymers.

[0081] In some embodiments, the polymer fabric is a polymer matrix and comprises a composite of polymers. In some embodiments, the polymer matrix comprises two polymer layers. In some embodiments, the polymer matrix comprises a degradable polymer and/or a non-degradable polymer. The polymer matrix can be patterned at the nano-, micro- or millimeter-scale, or a combination thereof. Such patterning confers a distinctive appearance to the polymer matrix which may comprise a pure polymer or a polymer blended with a non-degradable polymer or non-polymeric material. In some embodiments, the top layer comprises a degradable polymer, and the bottom layer comprises a porous polymer.

[0082] In some embodiments, the polymer matrix is a free-standing film of polymer, a blend of polymers, or a composite material. In some embodiments, the polymer matrix is coated onto a carrier layer in the form of a film or a coating.

[0083] In some embodiments, the polymer fabric is nonwoven fabric. As used herein, the term “nonwoven fabric” refers to a fabric-like material made from staple fibre (short) and long fibres (continuous long), bonded together by chemical, mechanical, heat or solvent treatment. Nonwoven fabrics are engineered fabrics that may be single-use, have a limited life, or be very durable. Nonwoven fabrics provide specific functions such as absorbency, liquid repellence, resilience, stretch, softness, strength, flame retardancy, washability, cushioning, thermal insulation, acoustic insulation, filtration, use as a bacterial barrier and sterility. Nonwoven fabrics can be used alone or as components of personal care products such as facemask, sanitary pad, tampon, baby diaper, or adult incontinence products.

[0084] In some embodiments, the nonwoven fabric is treated with plasma surface treatment to create surface-active nonwoven fabrics. For instance, phages can be covalently or noncovalently attached to surface-active nonwoven fabrics using methods described herein and disclosed in U.S. Pat. No. 9,277,751; Wang et al., Immobilization of active bacteriophages on polyhydroxyalkanoate surfaces. ACS Appl. Mater. Interfaces, 216, 8, 2, 1128-1138, each of which is incorporated by reference herein in its entirety.

[0085] In some embodiments, phages are noncovalently attached to surface-active nonwoven fabrics integrated into disposable personal care products. The phages are attached so that the capsid adsorbs to the surface of the nonwoven fabric via electrostatic charge and the tail is exposed away from the surface of the fabric. In some embodiments, misting is used to attach phages to surface-active nonwoven fabrics.

[0086] In some embodiments, phages are immobilized to the polymer fabric (e.g., nonwoven fabric) by chemical bonding, physical adsorption, bulk mixing, or a combination thereof. One or more phages may be immobilized to the polymer fabric to enable killing or suppressing growth of multiple microorganism strains. Methods for immobilizing phages to polymer matrix are described in U.S. Pat. No. 9,921,219, which is incorporated by reference herein in its entirety. Suitable methods for immobilization include, but are not limited to, biotinylation of the phage capsid for biotin-streptavidin affinity bonding (Gervais et al., 2007; Edgar et al., 2006; Smelyanski et al., 2011); direct covalent bonding using n-hydroxysulfosuccinimide and 1-ethyl-3-(3-dimethylaminopropyl) carbodiimide as linkers (Hermanson, 2008); and plasma-treated surface bonding (Pearson et al., 2013), each of which is incorporated by reference herein in its entirety.

### 6.2.3. Personal Care Products

[0087] In some embodiments, phage combinations are attached to a personal care product that directly contacts or has prolonged contact with a subject's skin. Non-limiting examples of personal care products are facemasks, sanitary pads, tampons, baby diapers, adult incontinence products, cosmetics, cosmetic facial pads or wipes, fingernail wipes, or patient bathing hygiene textile.

[0088] As described herein, the personal care product can be a facemask incorporated with the phage combination. The facemask can be a surgical or a non-surgical facemask. Such a facemask typically has an inner sheet made from nonwoven fabrics such as polypropylene, a rayon/polyester blend, or polycaprolactone (PCL). Facemasks abrade the face and increase moisture and temperature on the skin. Bacteria including Staphylococcus aureus, Staphylococcus argenteus and Cutibacterium acnes proliferate on the interior surface of facemasks as well as on the surface of the skin. Proliferating bacteria and irritated, moist skin promotes the development of folliculitis, called maskne, a portmanteau of mask and acne. To reduce the proliferation of S. aureus, S. argenteus and C. acnes, phages that infect those species are attached to the nonwoven fabric by methods as described herein, for example in Example 4.

[0089] The personal care product can be a diaper for adult incontinence incorporated with the phage combination. The diaper may have a top sheet made from nonwoven fabrics such as curled-fiber cellulose fiber, polyester fiber, polyethylene fiber, nylon fiber, polypropylene fiber, polylactic acid fiber, polyhydroxyalkanoate fiber, polyethylene terephthalate fiber, polypropylene carbonate fiber, or mixtures of the different fibers. When urine is absorbed by the diaper and held against the skin, it increases moisture and pH, reduces the natural moisture barrier of the skin, causes redness, broken skin, and sometimes bleeding. Bacteria such as Enterococcus species and Escherichia coli proliferate and exacerbate incontinence associated dermatitis (IAD). To reduce proliferation of bacteria associated with IAD, phages that target Enterococcus species and E. coli may be attached to the nonwoven polymer top sheet of the diaper in a similar fashion as in the case of the surgical facemask, activating the surface by imparting a charge to bind to the negatively charged phage capsid or creating active sites for covalently bonding the phage capsid.

[0090] As another example, the personal care product can be a baby diaper incorporated with the phage combination. The diaper may have a top sheet or outward facing surface made from nonwoven fabrics such as polyester fiber, polyethylene fiber, polypropylene fiber, rayon/viscose fiber, polylactic acid fiber, acrylics, olefins, polyhydroxyalkanoate fiber, polyethylene terephthalate fiber, polypropylene carbonate fiber, or mixtures of the different fibers. Diaper dermatitis (DD) in babies is strongly associated with Candida albicans, Staphylococcus aureus, S. argenteus, and Enterococcus species. S. aureus, S. argenteus in particular produces an exfoliative toxin that can exacerbate DD and shows a strong statistical correlation with DD. Phage that infect S. aureus, S. argenteus and Enterococcus species can be attached to the nonwoven polymer top sheet of the diaper in a similar fashion to the surgical facemask.

[0091] The personal care product can be a feminine care product such as a sanitary pad incorporated with the phage combination. The sanitary pad may have a top sheet or outer-facing surface made from nonwoven fabrics such as polypropylene fiber, polyethylene fiber, polyethylene/polypropylene fiber, polylactic acid fiber, polyhydroxyalkanoate fiber, polyethylene terephthalate fiber, polypropylene carbonate fiber, or mixtures of the different fibers. Pad rash is an unpleasant but non-life-threatening complication of wearing sanitary pads. The sensitive skin around the vagina becomes inflamed due to friction from the pad, increased moisture, pH, and temperature. Skin occlusion also generally promotes the proliferation of bacteria on the surface of the skin that can contribute to pad rash. Less often, but more critically, sanitary pads can promote the growth of Staphylococcus aureus, S. argenteus or Streptococcus species, which enter the vagina and can reach the bloodstream. If they reach the bloodstream, they may cause Device-Associated Menstrual Toxic Shock Syndrome, which is life-threatening. Phage that infect S. aureus, S. argenteus and Streptococcus species can be attached to the nonwoven polymer topsheet of the sanitary pad in a similar fashion to the surgical facemask. The phage-functionalized topsheet prevents proliferation of S. aureus, S. argenteus and Streptococcus species in the pad and on the surface of the skin, thus reducing the occurrence of pad rash and Device-Associated Menstrual Toxic Shock Syndrome.

[0092] Another example of a personal care product is a tampon incorporated with the phage combination. The tampon may have a top sheet or outer surface made from nonwoven fabrics such as polypropylene fiber, polyhydroxyalkanoate fiber, polyethylene fiber, polyethylene terephthalate fiber, polylactic acid fiber, polypropylene carbonate fiber, or mixtures of the different fibers. Tampons can promote the growth of Staphylococcus aureus, S. argenteus or Streptococcus species when not changed after a period of time (e.g., about 4-8 hours). The bacteria can reach the bloodstream. If they reach the bloodstream, they may cause Device-Associated Menstrual Toxic Shock Syndrome, which is life-threatening. Phage that infect S. aureus/argenteus and Streptococcus species can be attached to the nonwoven polymer topsheet of the sanitary pad in a similar fashion to the surgical facemask. The phage-functionalized topsheet prevents proliferation of S. aureus, S. argenteus and Streptococcus species in the pad and on the surface of the skin, thus reducing the occurrence of Device-Associated Menstrual Toxic Shock Syndrome.

### 6.3. Methods

### 6.3.1. Identification of Bacteriophage Combination

[0093] Selection of bacteriophages: Bacteriophages may be selected for inclusion in a mixture or formulation based on any useful characteristic. Characteristics that may be used for selection of bacteriophages, include, in non-limiting examples, non-lysogeny or non-integration in a host genome, host range (e.g., specific to a host organism with minimal off target binding), and stability in a given formulation. In some instances, combinations of bacteriophages may be selected for a designated microbiome type or host range (e.g., for targeting a given bacterial strain such as C. acne), which in combination may aid in preventing bacterial resistance.

[0094] Accordingly, in a second aspect, disclosed herein are methods for selecting the phages to target the bacteria most commonly associated with contact dermatitis. In certain embodiments, contact dermatitis is skin presentation of one or more of diaper rash, maskne, sanitary pad rash, or incontinence-associated rash.

[0095] In some embodiments, the method further comprises screening skin samples from a subject or a population of subjects to identify bacteria commonly present and are associated with contact dermatitis. Bacteriophage assays are as described in WO2022198091A1, which is incorporated by reference herein in its entirety.

[0096] Bacteriophage assays: Screening of the samples may be performed to determine one or more agents (e.g., small molecules, bacteriophages, or biological molecules, e.g., proteins, peptides, lipids, carbohydrates, metabolites, or combinations thereof) capable of inhibiting growth or otherwise killing (e.g., via lysing) of one or more microorganisms of the samples. In some examples, the one or more agents comprises one or more bacteriophages. For example, the one or more bacteriophages may be naturally occurring, recombinant, or synthetic bacteriophages that are capable of lysing a type of bacteria present on the skin sample. In such an example, the screening of the samples may comprise: obtaining one or more microorganisms from the sample, optionally culturing the one or more microorganisms, and exposing the one or more microorganisms to a plurality of bacteriophages to generate a microorganism-bacteriophage mixture. The growth, proliferation, or death of the microorganisms may be monitored over a duration of time, and the microorganisms may be collected, stored, and/or sequenced. Sequencing (e.g., shotgun metagenomic sequencing) may yield information on the bacteriophages that are present in or on the microorganisms and that may be capable of killing or inhibiting growth of the one or more microorganisms. Accordingly, such screening, e.g., the combination of culturing microorganisms with bacteriophages and sequencing the mixture, may be useful in determining combinations of bacteriophages to remove particular microorganism (e.g., bacterial) strains.

[0097] In some instances, the screening may comprise sequencing one or more microorganisms isolated from a sample. For example, the one or more microorganisms isolated from the sample may be (i) cultured to generate a microorganism library and (ii) sequenced (e.g., via shotgun metagenomic sequencing) to generate a library of sequence reads comprising sequences from the microorganisms present within the sample. Additionally, the cultured microorganisms may be further exposed to one or more bacteriophages, and then isolated and sequenced, as described above. The sequences corresponding to the one or more bacteriophages may be stored in a bacteriophage library (Table 1). Alternatively or in addition to, the one or more bacteriophages may be stored and further screened, e.g., using a bacteriophage host range assay, to determine bacterial strains which may be susceptible to the one or more bacteriophages.

[0098] Bacteriophage source: The one or more bacteriophages may be synthetic or naturally occurring. The one or more bacteriophages may be isolated or extracted from an environmental source, including, but not limited to: sewage, soil suspensions, ocean sediment, terrestrial sub surfaces, etc. In such instances, further processing of the environmental source may be performed to purify or enrich for the bacteriophages.

[0099] Bacteriophage host range assay: A bacteriophage host range assay may be used to determine a host or suite of host cells (e.g., bacterial cells) that are susceptible to a given bacteriophage in vitro. In some instances, the bacteriophage host range assay is performed using the one or more microorganisms isolated from the sample, or a plurality of samples, and one or more bacteriophages present in an environmental sample. For example, bacteria from one or more skin samples may be collected and optionally, a portion of the collected bacteria may be sequenced for identification of the bacteria type (e.g., bacterial species or variant). The collected bacteria may be cultured (e.g., on agar plates), distributed on a phage host range assay dish, and contacted with viral fractions from an environmental source, which may comprise one or more bacteriophages (e.g., lytic bacteriophages). Optionally, the collected bacteria may be pre-sorted or processed, such that only one strain type or class of strain types is present per dish of the phage host range assay. The bacteria-bacteriophage mixtures on the phage host range assay may optionally be cultured. The bacteriophages that grow on or within the collected and cultured bacteria and/or lyse or prevent growth of the cultured bacteria on the assay may be isolated, optionally propagated, and stored as part of a bacteriophage library. Alternatively or in addition to, the bacteriophages may be sequenced. Such sequencing data may then be used to associate each of the isolated bacteriophages with a particular host organism. Accordingly, such an assay may be useful in determining the identities and genomic sequences of bacteriophages that are capable of removing one or more microorganisms from a sample. As the identities of the one or more microorganisms are also known (e.g., from sequencing), the host range of each bacteriophage may be determined. Accordingly, for a given target bacterial strain, an appropriate bacteriophage may be selected for inclusion in a formulation designed to lyse the targeted bacterial strain.

### 6.3.2. Attaching Bacteriophage Combination to Polymer Fabric

[0100] Also disclosed herein are methods for attaching phages to polymer fabric that is incorporated into disposable personal care products. In some embodiments, the polymer fabric is nonwoven fabric.

[0101] The surface of the polymer fabric (e.g., nonwoven fabric) is activated by imparting a positive charge via surface plasma treatment or corona discharge treatment. Phages are attached to the activated surface of the polymer fabric (e.g., nonwoven fabric) by spraying, misting, or printing. In certain embodiments, the phages are attached to the activated surface of the polymer fabric by misting. The polymer fabric (e.g., nonwoven fabric) may be immersed in a low-salt buffer (salts at concentration less than 50 mM) containing at least 109 PFU/mL (PFU=plaque forming units). Without being bound to any theory, the naturally negatively charged capsids of the phages attach to the charged, activated surface of the nonwoven fabric, leaving the positively charged phage tail prone to infect and kill bacteria that contact the surface of the polymer fabric (e.g., nonwoven fabric) incorporated into the facemask. Alternatively, phages may be covalently bonded to the nonwoven polypropylene or rayon/polyester fabric via surface activation chemistry such as EDC/NHS chemistry or acidic surface activation that enables amine groups on amino acid side-chains on the phage capsid to covalently bond to activated carboxyl groups on the polymer surface.

[0102] An exemplary method for attaching bacteriophage combination to a polymer fabric is shown in FIG. 8, it describes a processes enabling the treatment of nonwoven fabrics of diverse composition to be impregnated with phages of diverse morphology and host specificity after plasma treatment of the nonwoven fabric inline during a manufacturing process as follows: (1) The nonwoven fabric is plasma-treated (either encased or open-air plasma treatment) in-line in an automated manufacturing process; (2) Surface-active nonwoven fabric can be impregnated on both surfaces using a dip tray (also called an impregnation tank or dip tank); and (3) The nonwoven fabric is gently dried with an air dryer at temperatures below 50° C. that do not denature phage virions

### 6.3.3. Subject

[0103] The term “subject,” as used herein, generally refers to an animal, such as a mammal (e.g., human) or avian (e.g., bird), or other organism, such as a plant. For example, the subject can be a vertebrate, a mammal, a rodent (e.g., a mouse), a primate, a simian or a human.

[0104] Animals may include, but are not limited to, farm animals, sport animals, and pets. A subject can be a healthy or asymptomatic individual, an individual that has or is suspected of having a disease (e.g., skin conditions, cancer), or a pre-disposition to the disease, an infection, a health condition, and/or an individual that is in need of therapy or suspected of needing therapy. A subject can be a human. A subject can be a patient.

[0105] In some embodiments, the subject has acne. In some embodiments, the subject has one or more skin conditions such as but are not limited to acne, diaper rash, maskne, sanitary pad rash, and incontinence-associated rash, redness, eczema, rosacea, aged skin, or skin infection. The subject may have or at risk (e.g., more susceptible or prone to be having the condition) of having one or more skin conditions caused by or associated with a particular microbiome subtype. The subject may have one or more microbial variants detected in or living on the subject's skin.

[0106] In accordance with the provided methods of treatment, the bacteriophage mixtures or formulations may be used to treat a skin condition which may be caused by or associated with a particular microbiome subtype (e.g., a particular microorganism, such as a bacterial strain, or combination of microorganisms). For example, a formulation described herein may be used to treat acne, inflammation, redness, eczema, rosacea, enlarged hair follicle pore size, rough skin texture, increased trans-epidermal water loss, skin dehydration, skin discoloration (e.g., hyperpigmentation), disproportionate elasticity of the skin or portion thereof (stratum corneum, dermis, etc.). The formulation may comprise one or more bacteriophages that are capable of lysing or inhibiting growth of one or more microorganisms that are associated with a skin condition, e.g., Cutibacterium acnes or Staphylococcus aureus, which may be associated with acne.

[0107] As described herein, the skin samples may comprise one or more microorganisms associated with a skin condition (e.g., acne, eczema, redness, etc.). Accordingly, the bacteriophage mixtures and formulations may be targeted for any of the species or variants of skin microorganisms which may be associated with the skin condition. For instance, one or more bacteriophages may target a bacteria, such as a bacteria from the Actinobacteria, Firmicutes, Proteobacteria, Bacteroidetes phyla. The one or more microorganisms may comprise, in some examples, a Cutibacterium bacterium (e.g., C. acnes, C. namnatense, C. avidum), a Staphylococcus bacterium (e.g., S. aureus, S. epidermidis, S. warneri, S. pyogenes, S. mitis), a Corynebacterium bacterium, an Acinelobacler bacterium (e.g A. johnsonii), a Pseudomonas bacteria (e.g., P. aeruginosa), other bacteria, or combinations thereof. In some instances, the one or more bacteriophages may be targeted for a fungal microorganism, including, but not limited to: yeasts, such as Candida albicans, Rhodotorula rubra, Torulopsis and Trichosporon cutaneum, dermatophytes such as Microsporum gypseum, and Trichophyton rubrum, and nondermatophyte fungi such as Rhizopus stolonifer, Trichosporon cutaneum, Fusarium, Scopulariopsis brevicaulis, Curvularia, Alternaria alternata, Paecilomyces, Aspergillus flavus and Penicillium. The one or more bacteriophages may target a combination of microorganisms; such a combination may be determined, for example, using a host range assay, as described elsewhere herein or in WO2022198091A, which is incorporated by reference herein in its entirety.

### 6.3.4. Kits

[0108] Also provided herein are kits for incorporating phage combination attached to a synthetic nonwoven polymer fabric in a disposable personal care product used in close contact with the skin. Such a kit may comprise a phage combination non-covalently attached to a polymer fabric (e.g., synthetic nonwoven polymer fabric). The kit may comprise phage combination in a culture for attaching the phage combination onto a polymer fabric (e.g., synthetic nonwoven polymer fabric). Such a kit may comprise instructions for attaching the phage combination onto the polymer fabric. The kit may comprise, for instance, reagents, such as stabilization agents, buffers, preservatives, fixatives, or pH balancing reagents. The kit may additionally comprise instructions for applying the personal care product incorporated with the polymer fabric, storage, transportation, or treatment.

### 6.4. Treatment Regimens

[0109] In the methods provided herein, the terms “treatment”, “treating”, and the like are used herein to generally mean obtaining a desired pharmacologic and/or physiologic effect. In certain embodiments, the effect is therapeutic in terms of a partial or complete response of the microorganism growth which includes inhibiting growth or preventing regrowth of the microorganism, and/or reducing or eliminating one or more symptoms associated with contact dermatitis.

### 6.4.1. Combination Administration

[0110] In some embodiments of the provided methods for treating one or more skin conditions, the phage combination is administered to a subject in combination with one or more skin care products or medications. For instance, the phage combination attached to a polymer fabric (e.g., nonwoven fabric) may be used in combination with a skin lotion, cream, toner, cleanser, and/or wipe. In another example, the phage combination attached to a polymer fabric (e.g., nonwoven fabric) may be used in combination with a medical procedure, e.g., a surgery. In such example, polymer fabric (e.g., a mesh wound dressing) containing the phage combination may be applied onto a wound, a cut, or a surgery site to prevent bacterial growth or infection.

### 6.4.1.1 Administration of Bacteriophage

[0111] In various embodiments, the phage combination attached to a polymer fabric (e.g., nonwoven fabric) is incorporated into a personal care product for administration to a subject. In some cases, the phage combination attached to a polymer fabric (e.g., nonwoven fabric) is administered to a subject by directly applying the polymer fabric onto the skin of the subject.

[0112] In some embodiments, the phage combination is administered to the subject by the subject, a physician, a health care professional, and/or a caretaker.

[0113] In certain embodiments, the phage combination is administered once, twice, three times, four times, or more every day. In certain embodiments, the phage combination is administered once every day. In certain embodiments, the personal care product incorporated with the phage combination is administered once every two days. In certain embodiments, the personal care product incorporated with the phage combination is administered once every three days. In certain embodiments, the personal care product incorporated with the phage combination is administered once every four days. In certain embodiments, the personal care product incorporated with the phage combination is administered once every five days. In certain embodiments, the personal care product incorporated with the phage combination is administered once every six days. In certain embodiments, the personal care product incorporated with the phage combination is administered once every week. In certain embodiments, the personal care product incorporated with the phage combination is administered once every two weeks. In certain embodiments, the personal care product incorporated with the phage combination is administered once every three weeks. In certain embodiments, the personal care product incorporated with the phage combination is administered once every month. In certain embodiments, the personal care product incorporated with the phage combination is administered as needed.

[0114] In some embodiments, the personal care product incorporated with the phage combination is administered to a subject until the subject's skin condition (e.g., contact dermatitis) is partially or fully eliminated. In some embodiments, the personal care product incorporated with the phage combination is administered to the subject reduces one or more symptoms of contact dermatitis or skin infection, and/or reduces body odor.

### 7. EXAMPLES

### 7.1. Example 1: Composition of Multiple Phages that Infect Bacteria on the Surface of the Skin that are Associated with Contact Dermatitis

[0115] In this example, phages capable of lysing or killing one or more bacteria including Staphylococcus aureus, Staphylococcus argenteus, Streptococcus pyogenes, Streptococcus pneumoniae, Escherichia coli, Enterococcus faecalis, Cutibacterium acnes, and Corynebacterium tuberculostearicum are identified. The combination of multiple phages that target or infect the bacteria most commonly associated with contact dermatitis are attached to plasma surface-treated synthetic nonwoven polymer fabrics including polylactic acid (PLA), polyester (PE), acrylics, olefins, polyhydroxyalkanoates (PHA) such as polyhydroxybutyrate (PHB), polyethylene terephthalate (PET), polypropylene (PP) and polypropylene carbonate (PPC). The surface-treated nonwoven fabric is incorporated in a disposable personal care product that is in close contact with the skin, such as a facemask, sanitary pad, tampon, baby diaper, adult incontinence products, or cosmetic facial pads or wipes, fingernail wipes, or patient bathing hygiene textiles.

### 7.2. Example 2: Selecting the Phages to Target the Bacteria Most Commonly Associated with Contact Dermatitis

[0116] In this example, phages that target or infect the bacteria described in Example 1 are selected.

[0117] Those bacterial strains are cultivated. Phages infecting those strains are isolated from environmental samples. The environmental samples are enriched for phages by adding enrichment broth and broth culture to the sample and incubating overnight. The enriched phage population is separated from the broth culture by sterile filtration. Phages are isolated from the enrichment broth filtrate by the classical top-agar plaque-plate method. Phage isolates are amplified on the target bacterial strain. DNA extractions from the isolates are sequenced to screen the phage genomes for genes related to antibiotic resistance, toxicity, lysogeny, or transduction. Screened phages are tested for host range and combined to maximize host range. Sets of phages that infect the same host species are tested in pairs for preventing bacterial regrowth in broth culture. Pairs that prevent bacterial regrowth are selected. The pairs selected may be pairs that do not occur together in nature. They may be selected to be complementary in their action for presenting bacterial regrowth. Particular subunits of the genomes of the selected phage pairs are selected for a composition, where these are selected to prevent antibiotic resistance or have various other beneficial properties, such as inhibiting bacterial growth, infecting and/or killing bacteria, and preventing bacterial regrowth.

### 7.3. Example 3: Attaching Phages to Nonwoven Fabrics that are Incorporated into Disposable Personal Care Products

[0118] In this example, phages that target or infect the bacteria described in Example 1 are attached to a nonwoven polymer fabric. Phages are concentrated from bacterial growth broth and resuspended in a low-salt phage buffer via TFF diafiltration. Plasma surface treatment is applied to the nonwoven fabric and the phage buffer is misted onto the surface-treated nonwoven fabric and dried at room temperature. The nonwoven fabric is incorporated into the disposable personal care product.

### 7.4. Example 4: Preparing Activated Polymer Fabric for Phage Combination Attachment

[0119] In this example, nonwoven fabric is used. The surface of the nonwoven fabric is activated by imparting a positive charge via surface plasma treatment or corona discharge treatment. Phages are attached to the activated surface of the nonwoven fabric by spraying, misting, printing, or immersing the fabric in a low-salt buffer (salts at concentration less than 50 mM) containing at least 109 PFU/mL (PFU=plaque forming units). The naturally negatively charged capsids of the phages attach to the charged, activated surface of the nonwoven fabric, leaving the positively charged phage tail prone to infect and kill bacteria that contact the surface of the nonwoven fabric incorporated into the facemask.

[0120] FIG. 1 illustrates the use of a composition comprising phages as described herein for use in a personal care product. A subject's skin harbors a variety of bacterial species living in or on the skin surface (1) commensally. Phage targets a specific type of bacteria (2) by recognizing the phage receptor (3) presented on a target host bacterial species. It is noted that the nontargeted skin microbial commensal (4) remains uninterrupted. The phage (5) presents a negatively charged capsid (6), which is capable of binding to the positively charged (7) and activated polymer fabric surface (8). The polymer fabric is a nonwoven fiber. The phage (5) is a myovirus tailed phage. The phage (9) is a podovirus tailed phage, a distinct phage morphotype from a myovirus tailed phage. Upon phage attachment, the polymer fabric (e.g., surface activated nonwoven-fiber) (8) is functionalized with the immobilized phage (5) or (9).

[0121] Alternatively, phages may be covalently bonded to the nonwoven polypropylene or rayon/polyester fabric via surface activation chemistry such as EDC/NHS chemistry or acidic surface activation that enables amine groups on amino acid side-chains on the phage capsid to covalently bond to activated carboxyl groups on the polymer surface.

[0122] In some cases, more than one type of phage (e.g., a myovirus and a podovirus, or a phage that infects S. aureus and a phage that infects E. coli) is attached on a fabric, such as PET or PHB, to target more than one type of bacteria present that may be present in the area on which the fabric is placed or in contact. Prior to this, it was not known whether phages such as myoviruses or podoviruses or both might be able to be attached to nonwoven fabrics, such as PET and PHB, and whether there might be challenges that prevent the attachment of, for example, both types of phages to the same piece of nonwoven fabric or a mixture of phages to a nonwoven fabric. In addition, using phage treatments on personal care products is not simple as such products may include one or more chemicals or treatments, or various fabric features that affect phage attachment or use.

### 7.5. Example 5: Attaching Phage to PET Nonwoven Fabric and Inhibiting Bacterial Growth

[0123] In this example, nonwoven fabric was used. Phages were attached to the surface of the PET nonwoven fabric and inhibition of bacterial growth was measured.

[0124] FIGS. 2A-2C show phage attached to PET nonwoven fabric and was able to inhibit E. coli growth. As shown in FIG. 2A, a 1 cm² plasma-treated PET nonwoven fabric square without phage attached to it was applied to an agar plate with a lawn of Escherichia coli strain 11303. The sharp demarcation of the fabric square indicates that plasma-treated PET alone inhibited E. coli growth. However, no halo effect due to phage infection was measured.

[0125] FIG. 2B shows a 1 cm² plasma-treated PET nonwoven fabric square with E. coli myovirus T4 attached to it and was applied to an agar plate with a lawn of Escherichia coli strain 11303. There were clear halos extending from the PET square. These halos were plaques- or lacunae-formed by phage infection of E. coli. The data demonstrate phage were successfully attached to the plasma-treated PET nonwoven fabric square.

[0126] FIG. 2C is a replicate of FIG. 2B showing repeatable phage attachment to plasma-treated PET nonwoven fabric squares.

[0127] FIGS. 4A-4C show phage attached to PET nonwoven fabric and was able to inhibit Staphylococcus aureus growth. FIG. 4A shows a 1 cm² plasma-treated PET nonwoven fabric square without phage attached to it and was applied to an agar plate with a lawn of Staphylococcus aureus strain 100311. The sharp demarcation of the fabric square indicates that plasma-treated PET alone inhibited S. aureus growth. However, no halo effect due to phage infection was measured.

[0128] FIG. 4B shows an 1 cm² plasma-treated PET nonwoven fabric square with S. aureus podovirus Rosenblumvirus P00474 attached to it was applied to an agar plate with a lawn of Staphylococcus aureus strain 100311. There were clear halos extending from the PET square. These halos were plaques- or lacunae-formed by phage infection of S. aureus. E. coli myovirus T4 was successfully attached to the plasma-treated PET nonwoven fabric square and inhibited E. coli growth on a parallel solid plane such as an agar plate, in support of FIG.

[0129] FIG. 4C is a replicate of FIG. 4B showing repeatable phage attachment to plasma-treated PET nonwoven fabric squares.

[0130] In summary, the data demonstrate that, for the first time, phage was able to attach and retain on PET nonwoven fabric polymers and successfully inhibited multiple different bacterial growth.

### 7.6. Example 6: Attaching Phage to PHB Nonwoven Fabric and Inhibiting Bacterial Growth

[0131] In this example, nonwoven fabric was used. Phages were attached to the surface of the PHB nonwoven fabric and inhibition of bacterial growth.

[0132] FIGS. 3A-3C show phage attached to PHB nonwoven fabric and was able to inhibit E. coli growth. As shown in FIG. 3A, a 1 cm² plasma-treated PHB nonwoven fabric square without phage attached to it and was applied to an agar plate with a lawn of Escherichia coli strain 11303. No growth inhibition of E. coli due to phage infection was measured.

[0133] FIG. 3B shows a 1 cm² plasma-treated PHB nonwoven fabric square with E. coli myovirus T4 attached to it and was applied to an agar plate with a lawn of Escherichia coli strain 11303. There were clear halos extending from the PHB square. These halos were plaques- or lacunae-formed by phage infection of E. coli. The data demonstrate that phage were successfully attached to the plasma-treated PHB nonwoven fabric square.

[0134] FIG. 3C is a replicate of FIG. 3B showing repeatable phage attachment to plasma-treated PHB nonwoven fabric squares.

[0135] FIGS. 5A-5C show phage attached to PHB nonwoven fabric and was able to inhibit Staphylococcus aureus growth. As shown in FIG. 5A, a 1 cm² plasma-treated PHB nonwoven fabric square without phage attached to it and was applied to an agar plate with a lawn of Staphylococcus aureus strain 100311. No growth inhibition of S. aureus due to phage infection was measured.

[0136] FIG. 5B shows a 1 cm² plasma-treated PHB nonwoven fabric square with S. aureus podovirus Rosenblumvirus P00474 attached to it is applied to an agar plate with a lawn of Staphylococcus aureus strain 100311. There were clear halos extending from the PHB square. These halos were plaques- or lacunae-formed by phage infection of S. aureus. S. aureus podoviruses were successfully attached to the plasma-treated PHB nonwoven fabric square and inhibited S. aureus growth on a parallel solid plane such as an agar plate, in support of FIG. 1.

[0137] FIG. 5C is a replicate of B showing repeatable phage attachment to plasma-treated PHB nonwoven fabric squares.

[0138] In summary, the data demonstrate that phage was able to attach and retain on PHB nonwoven fabric polymers and successfully inhibited multiple different bacterial growth.

### 7.7. Example 7: Effect of T4 Myovirus Phage Attached to Nonwoven Fibers on Bacterial Growth

[0139] In this example, nonwoven fabric was used. T4 myovirus phages were attached to the surface of the PET or PHB nonwoven fabric and bacterial growth was monitored.

[0140] FIG. 6 shows dynamic growth curves of Escherichia coli strain 11303 showing the effect of T4 myovirus phage attached to plasma-treated PET and PHB nonwoven fibers. Dashed lines show E. coli growth curves with 1) no phage infection, 2) phage infection at a multiplicity of infection (m.o.i.) of 0.001, 3) phage infection at m.o.i. of 0.01, and 4) phage infection at m.o.i. of 0.1. These were compared with E. coli growth curves plotted by solid lines showing 1-cm2 plasma-treated nonwoven fabric squares of either PET or PHB with phage attached to them. Phages attached to surfaces such as PET or PHB were not as readily available for bacterial infection as phages added in suspension to a bacterial culture. Nonetheless, the phages attached to PET or PHB nonwoven fabric squares inhibited E. coli growth better than a phage suspension at an m.o.i. of 0.001 and less efficiently than—though comparable to—a phage suspension at an m.o.i. of 0.1. E. coli myovirus phage T4 was successfully attached to diverse types of plasma-treated nonwoven fabrics and inhibited E. coli growth.

### 7.8. Example 8: Effect of Podovirus Phage Attached to Nonwoven Fibers on Bacterial Growth

[0141] In this example, nonwoven fabric was used. S. aureus podovirus Rosenblumvirus P00474 phages were attached to the surface of PET or PHB nonwoven fabric and bacterial growth was monitored.

[0142] FIG. 7 shows Dynamic growth curves of Staphylococcus aureus strain 100311 showing the effect of S. aureus podovirus Rosenblumvirus PHP00474 attached to plasma-treated PET and PHB nonwoven fibers. Dashed lines showed S. aureus growth curves with 1) no phage infection, 2) phage infection at m.o.i. of 0.01, and 4) phage infection at m.o.i. of 0.1. These were compared with S. aureus growth curves plotted by solid lines showing 1-cm² plasma-treated nonwoven fabric squares of either PET or PHB with phage attached to them. Phages attached to surfaces such as PET or PHB were not as readily available for bacterial infection as phages added in suspension to a bacterial culture. Nonetheless, the phages attached to PET nonwoven fabric squares inhibited S. aureus growth similarly to a phage suspension at an m.o.i. of 0.01. Phages attached to PHB nonwoven fabric squares inhibited S. aureus growth similarly to a phage suspension at an m.o.i. of 0.1. S. aureus podoviruses were successfully attached to diverse types of plasma-treated nonwoven fabrics and can inhibit S. aureus growth.

### 7.9. Example 9: Effect of Siphovirus Phage Attached to Nonwoven Fibers on Bacterial Growth

[0143] In this example, nonwoven fabric is used. Siphovirus phages are attached to the surface of the PET or PHB nonwoven fabric and bacterial growth is monitored.

[0144] Growth of siphovirus infecting bacteria in four conditions are tested: 1) no phage infection, 2) phage infection at m.o.i. of 0.01, and 4) phage infection at m.o.i. of 0.1. Phages attached to surfaces such as PET or PHB nonwoven fabric squares inhibit siphovirus infecting bacteria growth. Siphovirus are successfully attached to diverse types of plasma-treated nonwoven fabrics and can inhibit targeted bacterial growth.

### 7.10. Example 10: Surface Modification of Nonwoven Fabrics

[0145] In this example, nonwoven fabrics were used. PET or PHB fabric squares of 2 cm×2 cm were treated with oxygen plasma. Plasma treatment was performed through Reactive Ion Etching (μEtch) in a cylindrical chamber 30 cm in diameter. A uniform glow discharge was created within a copper coil wrapped onto the chamber and connected to a radiofrequency (RF) generator. Commercially available oxygen gas (99.993%, Praxair, Edmonton, Canada) was input into the chamber. Samples of PET or PHB polymer fabric were treated in plasma at a floating potential for 1 min under a RF power of 100 W, an oxygen concentration of 25%, and a vacuum of 100 mTorr.

### 7.11. Example 11: Phage Immobilization on Nonwoven Fabrics

[0146] In this example, nonwoven fabrics were used. Adsorption on Untreated and Plasma Treated (PT) Fabrics. Attachment methods were performed in PBS buffer at pH 7.5. Oxygen plasma-treated and untreated PET or PHB fabrics of dimensions 2 cm×2 cm were immersed in 125-mL shake flasks containing 20 mL of a myovirus or podovirus suspension (2× 108 pfu/mL) and mixed at 4° C. and 60 rpm for 2 h. After exposure to phages, the films were washed seven times in PBS buffer to remove any unbound or loosely attached phages. All washing steps were performed at room temperature.

### 7.12. Example 12: Manufacturing of Surface Activated Nonwoven Fabrics

[0147] In this example, nonwoven fabrics were used.

[0148] This example illustrates enablement of inline phage treatment of nonwoven fabrics during manufacturing. As shown in FIG. 8, the processes described enables the treatment of nonwoven fabrics of diverse composition to be impregnated with phages of diverse morphology and host specificity after plasma treatment of the nonwoven fabric inline during a manufacturing process as follows: (1) The nonwoven fabric is plasma-treated (either encased or open-air plasma treatment) in-line in an automated manufacturing process; (2) Surface-active nonwoven fabric can be impregnated on both surfaces using a dip tray (also called an impregnation tank or dip tank); and (3) The nonwoven fabric is gently dried with an air dryer at temperatures below 50° C. that do not denature phage virions.

[0149] Alternatively, the process is as follows: (1) The nonwoven fabric is plasma-treated (either encased or open-air plasma treatment) in-line in an automated manufacturing process; (2) Alternatively, nonwoven fabric can be impregnated on one surface alone using a spray-on or misting apparatus; and (3) The nonwoven fabric is gently dried with an air dryer at temperatures below 50° C. that do not denature phage virions.

### 8. EQUIVALENTS AND INCORPORATION BY REFERENCE

[0150] While the invention has been particularly shown and described with reference to a preferred embodiment and various alternate embodiments, it will be understood by persons skilled in the relevant art that various changes in form and details can be made therein without departing from the spirit and scope of the invention.

[0151] All references, issued patents and patent applications cited within the body of the instant specification are hereby incorporated by reference in their entirety, for all purposes.

The application's sequence listing, which the Patent Office published only in electronic form, follows.

SEQUENCE LISTING (132 sequences)

SEQ ID NO: 1 - DNA, 12656 bp, unidentified
  source 1..12656: mol_type = unassigned DNA
catcggcgcccacaaagactcctttactttcgcctacggtgccaccaccaagcaacccggagcatccaaggcacaattgaaagtcttctgccaagtctctggcaccgaagacaagccgcaggtagaggacatgtccatcaacccttcacgctaacccgaaagacaacacacccattatgcctctcatgtccacctacatggctaatgcgggcctgtccgacatcatgcacatcctccataccgccgggggagcctgccggacaggcaccgacatcgccgcacgaatcaacacactccacccagaatacaatctccaagccaccaccgaccagctcatcgacatcgaaaaccgcatcgacactattcgcaaaaacattcaaaaagaaatcaagaaacacccgtgaacatcaccgaccacaccaccccagacctgcactcctacgaaacgttcttcaccagcctcgcatggatccaaggcggcatcatcacatggatgtacgcaaccggcaccccacacaaggcagccctcgccattattgccgcatgcgccctcgccaccctcctgggtgcatcaacactcacatacaagcccaaagacagcaaatgatcacaacacccatactgatcgctgaaaccctcgccataattattctcgcagtagcactcgcccacaacaacaaccagtaacccacccttaaggagcacacatctcatggatgagcccacccgcatgtacaccgaccccaacaccggtgcccgaaaagaattgaaactctgcaggctctccctcatcgaccccgcatcccttcacgctctcggcgaagtagcaggctacggtgccaccaaatacggcgacaacaactggaccggaggatacccgtggagccacagtgtcgacgccctctaccgccacctactatcatggcagcaaggcaacaacctcgaccgcgaatccgggctaccccatttggcacacgccgcctggcactgcctcgcactcctcgcataccagcaacacaatgccggggtagacacccgcaacccatggaacacccacaaaggcgaccagtaatgcctctagcacaatacccgaaaaccatccaccatccaggccacatctcctactcatcactgtcacagtgggccgaatgcggagaaaaatggcgcctatcccacggctaccacacccaacaccacacctggtacgccaccatcgccggaagcgccatacaccacatcaccgaacaatacgacctacacctgtacaatcccgccgaataccctgcactgccagacaaactctcatccttcaaaaatgttttcgacacccaagtcgccctcgccgaatccgaaggcacagaaatcaaaccctccggcagaatatgcaaaaacatgtgcgagtcgggcgggccacacaagaaggactacgactggtggatggtttacggccccacctttgtggaccgctggaaaacatggaggcgcaaccacccagaatacatcaccgcaatcctgggcggtaaaccaggcatcgaatacccggtagaaaccatcctcgacgatgacacaaaaatagtcggatacatcgaccgggtattcacagatacaaatacgggtgaaaccttcattttggacctcaaaaccggccgtctacccgccgacagtatgcagctgcacacataccggtacatgctcaaccaacacggcaacgatgtgacaaaaggcatgttttggacacccgccaccactaaggacgataagctatcctctgagcatggcaccgctacagacttgattgatcttgacaacaacacctaccggcatgtatcatccatgtacagtcaagcaatgaaaggaatcagcgaaggcatcttcgtcccacacgtcacaacactctgtaaaggatgccccgtacgagacgcctgctgggccgtcaatggcaaaaactcgtacagatacccggtagaatccaccgtacagccaccccaaacagacaataaagaaaaggacacctaatgaccgataaagacaagatcgacaatgatcgactcacgatcacactcaaatacggtggcgactatgctgccccatggaccgtcattaggggagacacagcagagcagacaaaacaggccatcatcgacctgctaggaggattgaaagacgaaaccgtatcgaaagactgggaccttgcaacactcgtagcgagcgcatccatcatcctccaagaccgatacaatcaggccaccaaagactacgtaaacaaaatcgccaatcaggaaaacgacatcataattgaccggatcaacaaagccaccagcaaggcagagctcgccgaccttctgaaacagtacaagaagatcatcaccagtaacagggacgtgtctgaggctttccgcagcaaacgcaacagcctcacccgataaaaaccgacacaaaccaacaaaaccaaacataaacagtaaaaggaaaacagttatgggactcgcaaactaccgcaacaacagcaacagcaccttcttcaacccctcccgaaaccaggacgccaccgccatcgccttcaaagtccacgatgtagaacacaacactgaaggctacggtggacaaacagcagaccgcatctacgctgatgtcacaatcttccacaccctaggcgatctcaacaacggcaccccagaaaccatccccaacgctattattgagaaagcgcgcggcaacaacgaccgcccacactccatgatccgcgatctagaagcctatcttggcgaggagcaggccttcaaactcgccaccgtacgcaccaaaaacggcttcaacgcggtaatcctcaaaccccttgatgacgccatctacgataaggttgccgcatacgtagacaagcgtgataacggccagctagacgacaccacagcctcaactgatgctgatatcgacatcgactccatctgaccaccaaaacacaaccaaccaatagatagataaggtcccgatgctctctctccaacgatccttcgagagagcctcccaaaccgcagccgagctgccccgcataccccagctagaacccctctaccgcaaccaggacatgcacatccacaaaggggatctcaccatgattgcggggcgctccggcagccaaaaatccgggctagccatgttcatcacagcgatgctcaaccagcccgccctctacatatcaggggacatgacaccctgggaggcctccacacgaatcatctcactcaacacccaacacaccaccacacagatacaacaaaacatcgacgactacgggccagaatactatcgagacagcatccaccacggccaacacatcacattctcattccagtcacccatcacatggaccgacatcaccacggaattgcaagcctacatggaaatgtggaacaccttcccacccatcattgttatcgacaacctgatggacatccaagactgcgagagtgactatcaggcacagcaagaagccatgcaatggatcacagcattaggtagggatactggctccaccatcatcgtcacacaccatgcaaccgacaaaaccggctccgacatcgaacacccgccagcacggcgagaaatcaaaaacggactctcagaaaaaccacaactcatcctcggagtctcattgtatggtggcgaggataatggcaacggcctcacgataccggcagaggcacgcatcgccgtactcaaacagcgcaccggcaaatccggtcctgacggaacccgatacgaacgactcaaagcctaccctgaatacacattcttcgggcccctcgccgaaaaacagccctggaacatgaccacaacacacaaaggactctaaaaaactatggccacacagcaggcacgcaaccggcgggccggagccgaatgggaaacacgactcctccaccagctacgcgacaccggccacgatatagaacgcctccacctcaacggccgcgaagacgaaggagacctcatccttcaaaccggaaacaaaacctacgttatcgaagcgaaagccgggcagccccatctcgccgaattcgtgaaacaagccagccgggaggcacgcaactacgaaacccaccgaaaccgagaaagccagtccaccatcggactcgtcgtcatgaaacagcgcaacaaaccctggagcgaagcctatgtggtatcaaccctcaacgagctcctcccacacctctgacacctgccgcctcctcgacacctaccggatacggtacaacccatccaagaacgagcaacacatcctctgcccgttccacgacgaccaccagccctccatgagcatcaacctcgacaagggtgtctggtactgccacacatgcggtgtcggaggcggacttgccaagctacaacaacgattagaagaagaaaacccgaatgtacgacagtatacgcccatacaacattgcggaacgccgccgaatccagaaagcctcagcccgctacgaaacccacctcgaaaacatactcgacctgctctcagcaagaggcatcagcgaagaaacagcccggctccaccaccttggatacatcgacaatgaccccataccaggccacgaagactacaaccagtgcatcaccatcccctacatgtaccccgtctggggcggcccagccgaaatacgaaaaatgcgtttccgctgctcactccagcatgattgcaaaacccacaaccaccccaaatatctaaccccggcaggggacacaggctccatctacaacatggccgccatggccaacccggcagccgaaatgcacatttgcgaaggcgaatccgactccatgatcctcgaacaatgcggatggtcggccgtagccctacccggcgcaacctcgtggcaaaacttttggaccaaattcttcgaaggctacgaccacatctacatctggtcagacccagaccccgcaggcgacaagatggcccaaaccctaacccaagcattaccgcaagccacccatgtgcccctcaccctgggggatgtcacagacacctacctgcaggccggaaaaacagggttggcacaagcactagacactgtgctacagtaaaacacgtcaacaacacgaaaccaggaaggtaaactaaaacatcatggatcccctcgacacgtgccccatccccaaccggcgcaacaccagccaaacagtcaggaggcgtatccgcctcgccatctgtgcagaaaaatgggctgatggtgaagaccccacctacatcatgcacacctggggcaccacctatgatgggatgcgatccatgatccgcgccaaccccgacattaaactacccgacgacatggccagacggttacacaaaatctgccggaaagcataccccaaaaaccagcccaacaggcaccgaagcggatgggacgcctacgagaaaaactactacacccacgaaatcctcttcctcgaccagttcaacatcccagccctcgaaatcctcaaccggctcgacgtgtcatgggccatgtggaaacaaatcatcaccgaaaaccatctcacacggctacaagacgagacctacaatgcgtgccactggcactatctgaaacagcaacacccagactggaccgaccagcaaatcacacaagcccaacacgccgggaacaacaccttcagccagttcatgcaagacgaacagccggcactatcgtgagcatctcgttcaaacccacaaaacgcaaccttcaaaccatccgagacatcctcacccaggccaccaacctcaacccagatgatctgccagatgacaccctcaacaacatcatccaatactgttggaacaccttcaccgacaacaaccggtacgccgtcgcggcacaatactggcgaggccaaaacccgcccgaccagcaacatcagcgcatactagtcggctactacaaaaccgttaaacaagccatgaacgcggccaaacaattccactggaacacccggctacaacaacaatggaaaacatggatactcccagtccacaacggcaccgtatcagagcatttcaccaaccagaaaacactcttcgacacacaaaccagcaaccagggtgacgccgcactgccggagcatctacaaaacgtcctgtgcggcaaaacactcaaccacacagacggaaccgtatcgtggtgcacacgcaaaccaggacacgacggcgactgccgcacaggatggcagcccaccacacaacccctaggacatcatggcagccaaaactgaaaccctcatccaacgctacggcaacaaagccgcagacgtcctcgccgacaaaaccatccccgccacacagctagcccaaatgctcactgaagccggataccccatctccgccaccgtcattaaagactatcgccgcaaacaagccaacaccaccccacaaacagaagaggaaaaccagtgatagacaacattgaccggctactcacacagctagccaactacgacaacgccatcgacaccatcgacgacaatctagccaatggtactgtacgacgcacacgaatctccgaatggacactccccaacggagaaacaggccgatccatacaaaaaataatcgaccaccaacccgcaacaaacccctaccctgtagacgaactcgtcgataaactagccgaatggacacccccaaaaccagccgacaacacccacaccgactacagcactgcggccttcgtcatcggggcgggagacttccaaatcggcaaaggcatccccggcggagaaacagcacacttcgccgacgactacctacactccctcgcctcagctaaacactactggcagcaagcaggccagccgcaacgagtccacatagccttcctcggcgacatgatcgaaggatacgtgtcacaaggaggcaacaacgcctggcgcacacaaacccccttgacggaacaaatccggctcacccgcatggccatgatgcaactcgtccacatgttcgaccactgccaaaacgtgacagtcacatccatccccggcaaccacggagaagccgtacgcttcggcaaaggcgtcaccacctacgacgactccttcgacgtagactgctgccgcgccatcgcagaagcctaccaactcaccaacaactaccccaacctccacttttattttcctgacagggacgaaatgaccaccaccgttgatgtggccggaacacggatactgcacgcccacggacaccaatggcgcaacaaccaacactacgaatggtggcgcggccaagaattccacaacggcaccgtatcccacattctcatggccggacacaggcaccacctcgaaatatccgagcaaggacaacgcacattcatacaatgcccatccatggaaggagaatccgtctggtaccggcacaagacaggcaccaccggcaaccccggactcgtgtgctacactatcaaccacaaaacaccagacaactaccaaatagccagataaaagagatgccatgagtagacgaccaaccaaagtccaacaagcaaccacagccaactgggaatgggccacccccaaccaccaacaccagctacacaaagcctgcaccaacattgcccgccactacccggccgtcaaccccgacgacctgtaccaagactctctactatatattgcggtacgcaaccaataccaccaactcacaggcaaccagtggacccaaatgtgctaccgtgtcgcccaacgactagcaaacaaaacagtccaccacctagacctacccaaacccgtccaagaaatcacagccatagccgacaaccaaaccagcaactaaggagaaccacaatggtcacaaccatcctcgacgacggcacccaaaccaccaggctacaaacagtaggcgccaccaccaccgccatcatcaccaacacagaaacacccgaaaccatcaccgccaaatacaccatcagtaaagacggcacagccacctacagcatcagcggaaacacctatttgggagaccaccaacacatcatcaaactcatgtacgactaccgccactgcgtcggacgcttcgacaccaccaacccagacaacccagacaacctcgacaacatgttaaggggatgacacatgaaccgaacctacaccaccgccgacatcattcaagccgcccaatggatctggaacggaggcccatggaaaccctccgtggagccaggcatgccacccccaccaaccgcgccacagcatcacggcaacaacattgtcaccatgatcgatctacagctagccatcgacgactacacactcgcctgccagccatccaaacagcgaaaacatttggcacggctggcagcattccgtgaagtatacggatacgatcaaacctattcggtggcagcccagcgacttggggtgaccaggcaaaccgtgaaacagtgggcagaccaaacactcatcaccctaacaggctacgcaaacagcagatactatccagacgataacgacgacagcacagggatgggataaaaacatgaacaacacacacaatatcccctacactgccctcaaaacagcggtacaccgtatcatccaacaacagcccaccaacatgcaacagttggaaaacattgttggcggtgtcgaaaaccagtaccgtgtaccaatctcactcgacaacgtgaaccttaccgtcaacgaagtcagcctcgacgatcttgctatcgaccaggacacgctagacgaatgcagtgaaatcctatgggactgcgacagtgcaggacaccccacaaacaacagcaacacccgtgacaacagcgaggaccagagcccctatgcaagccaggaagcactagactggctcgccggaatcgcataccaggcaaaactactgcaagcggaggccgacgatatcatgcagtccatcctctaccaccgcgacaaccacgaaggcgttatcggccaggatgttctagaccaggccaacgatactatctcagcctgcctccacctggaccagctcatcgaagacacactagacaacaacctgtaaaacccctatagacacaaaaagagtgccccagcagcagccaccacccaaccgtggcagcaccgctggggcacacatctatattcacttatgcaacagtagactctaccgtgccaacctcagactcggctgcacgccgaggcacatagccggcaaaaccatccacatcatctgcaggctcaatcatgccaggatccgacacatccaccgagtgcggctcaaccaagcccccatcgtcggggggaacaagcccagcatccacaaccgtggttttaggtttgccggccacaaacgacgggctaccaaacgatgtagcaaccgacaacaccgcagccaccgttgctgttatcagggcagactcccacggcaaaccgcgaaacgactccgcagtatacgtgacacccgccgtcacacccaacactgcaacaaacgtttgcacaaaagtcttagccgcccgctccagtaaacctaaccaaaactgtttacccacaacaaaccaccatcactttttcaaaccgttgacagtcgactcaagcctgtcaatacggctacgacacgccagcacgtaataccagacactccacaaagcatccttagtgcgccacagcttccccgtcacaggattcttcacccacgacaaagcctcgacacgcttacgcaagtcaccattctgcacctgaaccacaccaacatcgtgatgcagcttattcaccgaaccagtaagctgagcagacaattgtttaatctgatcacgcaaggctttcacatcagccaccgttaactcctcactctctccactgccgccgttcacgacggccataaacctgtcccacggaaaccacggccccggatcgtcatgatccgactgatgccacgcatccgtcacatcagtgtgcccgcagatgccccgcctgccagccttcaaatcagccacagacagtttcctcttcggaacaccatgcttgtcacacaactgccggcacagcaccgccgctctttccaccgcgggccacacccgaggatccagccactgctcacgagtgtaagcatgccctggcacccggaacgaggcgtgcgaaccgccatctgcgcaaacctctatacccaaactatgcggattcggcggggcatgccacccaatcgtagactccgacaagcactgcaccgtctccccaatatcgcaaacataatgcgccgaaccaccagacgatggggacacgaaatagtttgccgtggacaccgcccgccctttacgggaggcagacggaaaccccacatccgggcacgtcgcatgaatcacaaccctgttcaccggactattcgagccggccgagtgatgtgctgcaggaataaacctcaccacacaccaccaccaaacactaccatcacagccactcctttctatttgtgggatgatatagtcactataggcgacggtttcacaccctggcaggccaccgagcccgatattgtagaagccacaccgtcactatatttcacaacaaggcggcccccggaacagtacacagacgcaacagaacggccatccttaccatctttaccatcggatccgttcgcaccggcggggccgcgctcaccccgttcaccctgtgcaccttgcgggccggcaggacctgaagggcccacatcaccgcgctcaccggccgaaccatcccgaccagcagtgccatcaacgccgttcacaccgtcagcacctgcacggcctggaacaccatcacggccatccgacccattcacaccaggcaacccgtcaggacctttcacaccattcaaaccaggagaaccctgcggaccaacagggccaaccagcccagccgaaccattaacaccatcacgcccatcagcacctgcaggcccttgcgggccgcgctcaccggcaggacccggcacaccctgcacgctacgctcaacacgcacagcatccacacacaaaccagactggtgaagacgcaccgactcccgcccacccgaagcacacacccgcttcacactgctagccaaccctttagccgctgtaccattagactgggccctcgcctgctccgaatcccgctcagaggatacagccccgaaacgcaaagcacccccggcaaccaccgccaacaacacaagcgacaaaaacagcaacaccagtgaaaacttctcaaaattgcggcgctgccgcttctcctcctccaactccctcatcattcaccccccaacgtgtccgacaggaaactaggcaactcaggcaaaacaatcggatcaaccctgtcaggaagccgggcgttaaactggcgcacctcgcgccgcacacaccacgtatactcttccatcgcatctacctgagccgacagccgccgcaaacgcttccgagatttagatgtggcagcctgaaccgaacccaaaaccgtggccaatgcggtacagatagaggccaccagtgcaggagtaaaccacgacaccacagccccccgacatcacaccatccgccacaacaacagcccggtcacacgccgacagcaatccagttagctatcgcaggcacaccagaaggcttagacccgtcattcgtaataaaagccaaactaaaattactattagtaatattgtaggctttcacatcaatctgtgtcgtacccccagccgccgtagccatagacgccaccacaaccggcggagcaccgaacggccgctcaaacgggatcgtgtaagcatacacagcagacccgccaaacatgatctgcttagtgcccgtctcaatcctcggagacagtagcatccactcgcccgaatggttagcccacacagccccagaaggaaccatcacacggtcaccctccacaggggtcgggtcacacgcagcagactccccaaacgccacacgggcagctatagcacgcctgtcaagctgctgctgcaacccgttagacgacaccaccagggtagccaacagttgctgatggaacacgccaggctcggccctcaacacgtcacgggcacgctccgcacggccaccctgaacaatctccaacttggctgtgttctgctcccaatcccgagacaacaccacatagtcgtatcgggtctcaccggggccaggcagctgccctgtcaccgtctcaacactactagaagtgcacatcaccccgtgagcccaagcctgccccggaaaaacctcacacaacaccgtggcaccctgaacagtagtacccacacgaaaatcgtccggccccttcacagacggcatattacccatcagaccagacatttgagcccaatcatactcggtcaacacaccatcaaaccctttacacacaatacccacaacaaacccctaatctttttagaatttttgcaaatcccgcacacccgcagccaaaccagcaacacgccgtgctagcaacgccgacggattatcctcataatcccccgccacaggagtcaccttcgtccaaccatcaccaggcgatacacactccacatcaatctgccgcacaatctccgcaatagggccagaacccacatcaacatagatcaaatccccaggcatcagcttgcccggcccaanacgcaacacatccnactccgccaactcgntcttaaaccccgangaagcctgcaactcccc

SEQ ID NO: 2 - DNA, 15103 bp, unidentified
  source 1..15103: mol_type = unassigned DNA
ggttggtggtcgatgattttttgtatggatcggcctgtttctccgttgggtaaggtccattcggagatgcgtgtgcggcgtacggttccgttggcgagatcatcgcggatggtgtctgcttcgttgtcgtggttggctagctgggtgaggagccggtctatgttgtctatcatcggatatcctcttcttttttctgtgtggtgttggcttgtttgcggcgatagtctttaataacagtggcggagatagggtatcctgcctgggtgagctgttttgctagccatgaggcggggatggttttgtctgcgagcacgtcggcagccttattgccgtagcgttgaataagggtttcagttttggttgccatgatgtcctatcggttgtgtggtgggctgccaccctgtgcggcagtcgccgtcgtgtcctggtttgcgtgtgcaccgtgttgtggttccgtctgtgtggtggagtgttttaccgcacatgacgttttgtagatgctccggcagtgcggcgtcaccctggttgctggtttgtgtgtcgaagagtgttttctggttggtgaaatgctctgacacggtgccgttgtggactgggagtatccatgttttccattgttgttgtagtcgggtgttccagtggaattgtttggcggcgttttctgcctgttttatggttttgtagtagccgacgagtatgcgctggtgttgctggtcgggcgggttttggcctcgccagtattgtgccgcgacggcgtaccggttgttgtcggtgaaggtgttccagcagtattggatgatgttgttgatggtgtcatctggcagatcatctgggttgaggttggtggcctggttgaggatgtctcggatggtttgaaggttgcgttttgtgggtttgaacgagatgctcacgatagtgccggctgttcgtcttgcatgaactggttgaaggtgttgttcccggcgtgttgggcttgtgtgatttgctggtcggtccagtcggggtgttgctgtttcagataataccagtggcacgcatcgtaggtttcgttttgtagccgtgtgagatggttttcttcgatgatttgtttccacatggtccatgacacgtcgagccggttgaggatttcgagggctgggatgttaaactggtcgaggaagaggatttcgtgggtgtagtagtttttctcgtattggtcccatccgcttcggtgcctgttgggctggtttttggggtaggcttcccggcagattttgtgtaaccgtttggccatgtcgtcgggtagtttaatgtcggggttggcgcggatcatggatcgcatcccatcataggtggtgccccaggtgcgcatgatgtaggtggggtcttcgccatcagcccatttttctgctcagatggcgaggcggatgcgcctcctggcagcttggctggtgttgcgccggttggggattgggcacgtgtcgaggggatccatgatgttttagtgtacctttctggtttcgtgttgttgacgtgttttactgtagcacagtgtctagtgcttgtgtcaaccctgtttttccggcctgcaggtaggtgtctgtgacatcccccagggtgaggggcacatgggtggcttgcggtaatgcttgggttagggtttgcgccatctggtggcccgccttgtctgggtcggaccagatgtagatgtggtcatagccttcaaaaaatttggtccaaaaagtttgccacgaggttgcgccgggtagggcaacggccgaccatccgcattgttcgaggatcatggagtcgaattcgccttcgcaaatgtgcatttcggatgccgggttggccatggcggccatgttgtagatggagcctgtgtcccctgccggtgtcaaatatttggggtggttgtgggttttgcagtcgtgcgggagtgagcagcggaaacgcatttttcgtatttcggctgggccgccccaaacggggtacatgtatgggatggtgatgcactggttgtagttttcgtggccgggtatggggtcattgtcgatgtatccaaggtggtggtagcgggctgtttcttcgctgatgcctcttgctgagagcaggtcgagtatgttttcgaggtgggtttcgtagagggccgaggctttctggattcggtggcgttccgcaatgttgtaggggcgtatgctgtcgtacattcgggttttctttctctagtcgttgctgtagcttgtggagtccgcctccgataccgcatgtgtggcagtaccagacgcccttgtcgaggttgatgctcatggagggctggtggtcgtcgtggagcgggcagaggatgtgttgctcgtttttggacgggttgtagcgtatctggtagtggtcgaggaggcggcaggtgtcagaggtgtgggaggagctcgttgagggttgataccacataggcttcgctccagggtttgttgcgctgtttcatgatgacgagtccgatggtggactggttttcgcggtttcggtgggtttcgtagttgcgtgcctcccggctggcttgtttcacgaattgggctgggtgtggctggcccgctttggcttcgatcacataggttttgtggccggttgtgaggatgaggtcgccttcgtcttcgcggccgttgaggtggaggcgttctatatcgtggccggtgtcgcgtagctggtggaggagtcgtgtttcccattcggctccggcccgccggttgcgtgcctgctgtgtggccatagttttttagagtcctttgtgtgttgtggtcatgttccagggctgtttttcggcgaggggcccgaagaatgtgtattcagggtaggctctgagtcgttcgtatcgggttccgtcaggaccggatttgccggtgcgctgtttcaacactgcgatgcgggcttcggctgggatcgtgagcccgttgccgttgtcttcgccaccatacaatgagactccgaggatgagttgtggtttttcggagaggccgtttttgatttcgcggcgtgccggggggtgttcgatgtcggttcctgttttgtcggttgcgtggtgggtgacgatgatggtggagccagtatctctgcccaatgctgtgatccattgcatggcttcttgctgtgcctggtagtcactctcgcagtcttggatgtccatcaggttgtcgatgacaatgagtggtgggaaggtgttccacatttccatgtaggcttgtaattccatggtgatgtctgtccatgtgatgggtgactggaatgagaatgtgatgtgttggccgtggtggatgctgtctcgatagtattctggcccgtagtcgtcgatgttttgttgtatctgtgtggtggtgtgttgggtgttgagtgagatgattcgtgtggaggcctcccagggtgtcatgtcccctgatatgtagagggcgggctggttgagcatggcggtgatgaacatggctagccctgatttttggctgccggagcgccccgcaatcatgaccaaatcccctttgtggatgtgcatgtcctggttgcggtagaggggttctagctggggtatgcggggcagctcggcggctgtttgggaggccctctcgaaggatctttggagagagagcatcgggaccttatctatctatcggttggatgtgtattggtggtcagatggagtcgatatcgatatcagcatcagttgaggctgtggtgtcgtctagctagccgttatcgcgcttgcctacgtattcggcaaccttatcgtagatggcgtcatcaaggggttcgaggattaccgcgttgaagccgtttttggtgcgcacggtggcgagtttgaaagcctgctcctcgccaaggtatgcttctagatcgcggatcatggagtgtgggcggtcgttgttaccgcgtgctttctcaataatagcgttggggatggtttctggggtgccgttgttgagatcgtctagagtgtggaagattgtgacatcagcgtagatgcggtctgcgacctgtccgccgtagccttcagtgttgtgctgcacgtcgcggattttgaaggcgatggcggtgccgtcctgctttcgggaggggttgaagaaggtgctgttgctgttgttgcggtagtttgcgagtcccataactgttttccttttactgtttatgtttggttttgttggtttgtgtcggtttttatcgggtgaggctgttgcgtttgctgcggaaagcctcagacacgtccctgttactggtgatgatcttcttgtactgtttcagaaggtcggcgagctgtgccttgctggtggctttgttgatccggtcgatgatgatgtcgctttccttgttggcgatcttgttgacgtagtctttggcggctttatcgtatcggtcttgaagcaggattgctgcgctagcgatgagggttgcgaggtcccagtctttggatacggtttcgtctttcaatcctcctagcagatcaataatggattgtttgatgtcttctgcggtgtctccgcggatgacggcccatggggcagcatagtcgccaccgtatttgggagtgatcgtgagtcgatcattgtcgatcttgtctttatcggtcatttggtgtccttttctttattgtctgtttggggtggctgtacggtggattctaccgggtatctgtacgagtttttgccattgacggcccagcaggcgtctcgtacggggcatcctttacagagtgttgtgacgtgtgggacgaagatgccttcactgattcctttcattgcttgactgtacatggatgatacatgccggtaggtgttgttgtcaagattgtagagttcggtggatgtgccctgtgcgggggatttatcgtcgttgcggctggtggccggtgtccaaaacatgccttttgtcacatgtatgtcgtgttgttcgagcatgtaccggtatgtgtgcagctgcatactatcggctggtaggcgtcctgttttgaggtcgaggatgaatgtttcacccgtatctgtgtcagtgaaaacgcggtcaatatatccgactatttttgtgtcatcgtcgaggattgtttctaccgggtattcgatgcctggctggccgtctaggactgcggtgatgtattctgggtggttgcgcctccatgttttccaccggtccacgaaggtttggccgtaaaccatccaccagtcgtagtctttcttgtgtggcccgcccgactcgcacatgttcttgcatattctgccggagggtttgatttctgtgccttcggattcggcgagggcgacttgggtgtcgaaaatgtttttgaaggatgagagtttgtctggtagtgcagagtattcggtggggttgtacaggtgtaggtcgtattgttcggtgatgtggtgtatggcgcttccggcgatggtggcgtaccaggtgtgggaggtggctttgtatccgtgttggaggcgccatttttctccgcattcggcccactgggtgagtgaactgtaggagatgtggcctgggtggttgatggttttcgggtgttgtgctagaggcatgttagttgtttttgttccatgggttgcgggtgtcttggccggcctggtgtagctggtaggcaaggagtgcgaggcagtgccaggcagcatgggctagatgcggtagcccggattcgcggtcgaggttgttgccttgctgccatgatagtagatgcctgtagagggcgtcaatgctgtggctccacggatagccgccggtccagttgttgtcgccgtatttagtagcaccgtatccggctacttcgcctagggcgtgcaaggctgcggggtcgatgagtgagagcctgcagagttttaattcttttcgggctccggtgttggggtcggtgtacatgcgggtgggctcatccatggggtgtgtgctccttaagtgtgggttactggttgttgttgtgggctagtgctacggcgagaataatgatggcgagggtttcagcgatgaggatgggtgttgtgatcatttggtgtctcggggattgttggtgagggttgaggcacccaggagagtggcgagggcacatgcggcgatgatggcgagggctgccttgtgtgtggtgccggtcgcgtacatccatgtgatgatgccgccttggatccaggctaggctggtgaagaacgtttcgtaactgtgtagctcaatgttattgttgggtgtgttcatgcttgctcctgaagaatggtgttgatggttttataaatgttgtacaggtcggtttcgatagataacagttggttgatttggtggtcgagatcaatgtctgggttgagggtgttgatgcgggaggcgatgtcggtggctgtgcgtagtgtgccgccggtgtggtgaatgatgtgtgccgtgtcggcgagtccggtggtgacagcgtagtgggagaggagaggcatagctggggggtgctccttggcgggttactgttgcgggttgatgttgaggtcggtgacgtgcgggtggtcttctgttccggtgacgaggcagtggactgtgacgggtagtttggatgctcccggctgtttcgcggttgcgccgtagacgatggagaaggtgtctttaccaataattttgtggagttgtaggtcgatgtcggggttgccgttccatttgacaccgttttctgcggctgcctgggtggctttctggttgcaggcgtgtgcggcggtgatcatggttagccccttgctggtttcttcaccccttgcttgggcttgccggtgggcgcgctcctgttctgcttgtagggagcggactgctgcggcctggcgggctttcttctcagtcttgcgctgctggacggttttgggtgtccattcggcgtttgctgtggtggcttgtggggcgggctgtgaggcgagtggcgggttgtcgtctggggctggcaggaaggaggctgcggcgatgatggcggctgtgatgcctgcgatggtgtagccttttttcttgttcatgactgttgtcccctttccggggtgttgttcgttgctgacatgattaattatggtgtgggcggtggcccatgtcaaggctgcgctcaacgattatgagcgatccttgtatggctaggggttatatcgggcgcacagggtgagtaggtggccaacattgatgcggctcacattccagtagagttgcgtggcttccccaccggtgagtggcttccactcgtcatggctgtagacggtgccgtcggtggcgatgaacgtgttggggcgcagcttgtgaagttcagtctctacatgctgccggtaggcttcggcgaggccctcgaaatcgaggtggtcgcaggagaggttttcgaggcgtgtcaagtcgaaaggctcagggcagtccagggcgggggtgtagagctgggtgaagtggtcggcgatcttctgcatgacgggttcctttctggtgtgtggatggtttttatcgtgtggtttcttggaggtttgtggtggtgtcgatggtgtcgatctcccaggcgagttcctcggcctcatccgcggtgagtggctgccagttgcgtggcccatacactgcaccgtcgagagtgatggtccagtcggggcggaagaggtttaaggcttcttgcacagcatcccgatagacatgtttggcggcgtccaggttgatgtggttggcgtgtcggccggctagctgggtgaggtcgagggggtcgatttctgtctgcccgtagagggaggtgatggatggggtgatgagtgtggtggccatttttggtgtgttcctttcggtggtgtatgggttgttgtggtttctagagtgtgtaggttgcaaccgggagtcaaggctgcgctcaaccggattgagcgtttcatgctggagtgtcgggtgtgacagatgccacttaagcctttatggcatctctcagcgtctcaaatcttctgggggtaggatgatgcagggttagtcctgctgatcgattctaggccccatacagggcgtctcagtggtatgtctgggtgatagcgggtgtggcagatgatctagcgggtcaaggtgccgggcttagacataagatctatcatctagatgtgtgagatgtatcacactctcctggcttggtgtgccccctcaaggccacccagccgatctggcgtgaagggtgtagcccagaaataccgtttaaagctgtgacacggcgcctaggagcgccttacagggtgggggctaggtatttatacccccaagcaattctgatcgattctagacgtcccccagagcctgatacacgatcaaccatcccggcatagatcatcagcccctatcctggttagctcagcctcaactatgtggacagtgtgggatactgtggggggagaaggacgcggtaaaagaaagaggggggcatcagccttagggtcttagcactgatggacttagcaccgagcccctcaggggctcgacatcagcccgagcaggctcagctcatcaggcacagccctgaaagaggtacatgccatcagggaaggcttgagagtacgaggagccttagcgacgagtactcgaaagcctgagggaacaccctcagcactgatgggcctagcgtgttcggaaaagacacgggtcaaggtgtgacagctgtccgggagtgaaacccgttctgactaggggtttcagccttaaccacctgtaaaggttacaagactctaagaaaatttaaggaaaagtttaggtttaatttttggacctttactaccaaaaacacccgtttccacccctcaaacccgcctatagagccaaatccaccagtttgactcatccgaggtggggtgggataggctggacaggtagccagctggacgcaaggccggaaagtgctaacgcacttcccaacctcgcttagcatcagtctaccaaacacttaaagacctaagggcttagcgctaaggtgctgatagcttagcaccgagcccctcaagggctcggcatcagtcttaggtacttaaggatctaagttactataaaagctttaaagtcttaaagtaactataaaaccttaaaggctaagcacttaaggatataaaattaacatcagtgtgtaagacttaaagagttaaaataaccataaagctttaaacacttaaagtaactataaaacattaaagaccttaagtacttaaagttaaccatcagtcttaaactttaatattataacctataagtcttaaagcttataggtataataatataatataactatataagtattaaagcttataanttataaaagttttagnagagctaaggggttaacttctttacttctcttctctctttggttctttctctcttctcttcttttcttcatcaggggagaagaggaaccttttaccatcagcgtcgatgggcttttcaccgtgtgactcgtgtaccaccggtcgcacgctcccggtgacacactccccacactctgacacccgtgttcctttcaggcttagcgtgcttagctgaaggcgtacggcgtgtcacgccaacatccttaacactaggtaagacttaaagtgtatattatatgtagaagactttaaaaactttgaaggtgttcccgcttagcctgtgttctacaccgctaggcgctaagcgctaagtcttgaaacgcgaacacacacccaccccctttttctttcgtgtccttcttcttttgacaccgctggggggcgatgtgatctttctcacatgccagggggtagtggagaaaacaaccaccccaccacacacagaacaccccctcaaacaaacaaaacgcccccccagaatcgaacagcagggcaagggcaaggtattcatacccccaacagttcccaggccgttagagaggcaaataagacccatacagggctaggcgaggaacagacacatcatggcacgcaccaaccgcacagcatcctccgcccaccggcgctggcgggcaagactcatcacccaagcccgacaacaaggccaaaccgaatgcccactctgcggagcaaccatcacctgggacacacaccagctaccaacaagccccgaagccgaccacatcacacccgtcagccggggaggactcaacaccctcgacaacgggcaaatcatctgcagaacatgcaacagaagcaaaggcaatcgcagtgaaccaaacattagtttccaacaacaaaccacaaaaacgttgattccatggtgaaaaacccgccaacccccaccggggacaccccctgcacacccgtgcaaaacctcgtacggcttagtgaaatacctcccttttgtggttttgtctgtttgtcgactttttgtgttggtggtgagtgttgtgcagcctgagcttcctgatagtcgtgagtggtgtggggagacgcgtcgttggtggcgtgtgtggggtgaggatagtcgcgcgcagtatgtgtctgatgaggagtggctgtttctcatggatgctgcggtgattcatgatgtggtgtggcgtgagggtcgcgctgatttggtggcttcgcttcgtgctcatgtgaaggcgtttatgggcatgttggatcgttattcggttgatgtggtgtctggtggccgtggtgggggttctgcggtggcgatgattgaccggtatcggaagcgtaaaggggcctaatgtcgagcgttgttggttctcaggttcctcgtcatcgtgtggctgcagcgtattcggtgtctgcgggcggggatgctggggagcttggtagggagtatgggctgacgcctgatccgtggcagcagcaggtgttggatgattggcttgcggtgggtgcagggggtcgtcttgcttcgggtgtgtgtggggtgtttgtgcctcgccagaatggcaagaatgctattttggagattgtggagttgtttaaggcgactattcagggtcgcaggattttgcatactgctcacgagttgaagtcggctcgtaaggcgtttatgcggttgaggtcgttttttgagaatgagcggcagtttcctgacttgtatcgtgtggtgaagtcgattcgtgcgacgaatggtcaggaggctattgtgttgcatcacccggattgtgccacgtttgagcgtaagtgtggttgtccgggttggggttcggtggagtttgtggcccgcagtcggggttctgctcgcgggtttacggttgatgatttggtgtgtgatgaggctcaggagctgagcgatgagcagttggaggctttgcttcctacggtaagtgctgccccgtcgggtgatccgcagcagatttttcttggtaccccgccggggccgttggcggacggtagcgtggtgttgcgtcttcgcgggcaggctttgtcgggtggtaaaaggattgcgtggacggagttttcgattcctgacgagtctaacccggacgatttagctcgacaatggcggaaattggctgggaatactaatccagccttgggtcgccgcctgaattttgggacagtctcggatgagcatgagtcgatgtctgctgccgggtttgctcgggagcggcttggctggtgggatcgtggccagtctgcttcgtcagtgattccggcggataagtgggtccagtcggctgtggatgaggctagtctggttggcgggaaagtgtttggtgtctcgttttctcgttctggggatcgggttgctttggcgggtgctggccggactgatgctggggttcatgttgaggttattgatgggctgtcgggaacgattgttgatggtgtgggccggttggctgactggttggcggttcgttggggtgacacggagcggatcatggttgccgggtctggtgcggtgttgttgcagaaggcgttgacggatcgtggcattccgggccgtggcgtggtggttgctgatactggggtgtatgtggaggcgtgtcaggcgtttttggagggtgtcaggtcgggtgtgatcagtcatcctcgtgctgattctcgccgtgacatgttggatattgctgtgaggtcggctgtgcagaagaagaaaggctctgcgtggggttggggttcctcgtttaaggacggcagtgaggttcctttggaggctgtgtcgttggcgtttttgggggctaaacgtgttcgtcgtggccgtcgggagcgtagtggtaggaagcgggtgtctgtggtatgaacgtggatgagttggctctgattgagggcatgtttgatcgtatccaagggttgtcttcgtggcattgccgcattgagggctactatgagggctctagccgggtgcgtgatttgggggtggctattcctccggagttgcagcgtgtgcagacggtggtgtcgtggcctggtatagctgtggatgctttggaggagcgtctggattggcttggctggactaacggtgacggctacggcctggatggtgtgtatgcggcgaatcggcttgctacggcgtcgtgtgatgtgcatttggatgcgctgatttttgggttgtcgtttgtggctgttattccccaaggcgatgggtcggtgttggttcgtccgcagtcacccaagaactgtacaggccggttttcggctgacgggtctcgtctggatgctggccttgtggagcagcagacgtgtgatcctgaggttgttgaggctgagttgttgttgcctgatgtgattgttcaggtggagcggcgtgggtctcgtgagtgggttgagacgggccgtattgtgaatgttttgggtgcggttccgttggtgcctgttgtgaatcgtcgccgtacgtcgaggattgatggccgttcggagattacgaggtctattagggcttacacggatgaggctgttcgcacactgttggggcagtctgtgaatcgtgacttctatgcgtatcctcagcgttgggtgactggcgtgagcgcggatgagttttcgcagcctggctgggtcctgtcgatggcttctgtgtgggctgtggataaggatgatgacggtgacaccccgaatgtggggtcgtttcctgtgaattctcctacaccgtattcggatcagatgcggctgttggcgcagttgactgcgggtgaggctgcggttcctgaacgctatttcgggtttatcacgtctaacccgcctagtggggaggctttggctgctgaggagtcacggcttgtgaagcgtgctgagcggcgtcagacgtcgtttggtcagggctggctgtcggttggtttcctggctgccaagtcgcttgattcttcagttaacgaagctgatttttttggtgatgttggtttgcggtggcgtgatgcatcaacacctactcgggcggctacagcggatgctgtgacgaagcttgtgggtgccggtattcttccggcggattctcggacggtgttggagatgttgggtttggatgatgtgcaggttgaggctgtgatgcggcatcgtgccgagtcttcggatccgttggcggcactggctggggcgatatcgcggcaaactaacgaggtttgataggtgatggcttcgggtgttgcgtcgcggatggctgctgccgggtatcagcgtgaggcggtcaggtttgctgggaagtatgcgggctattatgccgagcttggtcgtttgtggcattccgggaagatgacagatgcgcagtatgtgcgtttgtgtgtggagttggagcgtgccggccatgacggttccgcggcgctggcgggcaaattcgtgtccgattttcggaagcttaacggtgtcgatcctggtttgattgtgtatgacgagtttgatgctgccgccgcgttggctaggtcgttttcgactatgaagatgatgaatagtgacccggatagggtgaatgatacgattgatgtgatggctgcgggtgttgatcgggctgttatgaatgctggccgtgacacggttgagtggtctgctggtgcgcagggtaggtcgtggcgcagggtgacggatggtgatccgtgtgctttttgtgccatgttggctacgaggtcggattatacgactaaggaaagggcactcactactggccatacgcggcgtcataggcgtggtggtaagcgcccgtttggttcgaagtatcatgatcattgtgggtgtacggtggttgaggttgttgggcgttgggagccctcctctgcggacaccgcatatcagcgggtttatgagaaggctcgtgagtgggttgatgatcatgggttgcagcagtcgcctggcaatattttgaaggctatgcgtactgttggcgacatgagatgatggtttccggttgtgtgccgccggttatcggtgcacagggttgtcacccgcacgggggtcaacaatgttgtgttgttttccgcaaggagtgtagggttaggctatggccgatcagagtgttgaggaacagaatgttgacaatgatgttgtggagtccggaaaggataacggcattgttgatacgataaaagacgatggcgggcaggaggtagccgacaatcagttgaagaatgaaggcggtgataagccgtctgggactgattggaaggcggaggctcgcaaatgggagtctcgtgctaaaagtaattttgctgagctagagaagcttcgctccaccgacgataattcggagtctactattgatggtcttcgtcgtaaaaacgaggaacttgagagtaggctgaatgagctggttttggagggtgtgaagcgtgaggtggccaccgagcatggcctctcggctgatgctgtagctttcttgtctggtggtgatcgtgagtcgcttgccgagtctgctaaagctcttaaggggctgattgaccatagtggtagtggtggcgcgggtgtgcgccgtcttgcggggagtgcccccgtgactgatgagaagcatcgcgagggtgtcgctttcgtggatgctttagtaaacaattctaggagacgatttatcatggctgacgattttctttctgcagggaagcttgagcttcctggttctatgattggtgcggtgcgtgaccgtgctatcgattctggtgtgcttgctaagctgtcgccggagcagccgacgattttcgggcctgttaagggtgccgtgttttcgggtgttcctcgcgccaagattgttggtgagggtgaggtctgtctcttatacacatctc

SEQ ID NO: 3 - DNA, 10869 bp, unidentified
  source 1..10869: mol_type = unassigned DNA
gtcgggtgatccgcagcagattttccttggtacgccgcctgggccgttggctgacggtagcgtggtgttgcgtcttcgtgggcaggctttgtcgggtggtaaaaggtttgcgtggacggagttttcgattcctgacgagtctgatccggatgatttggggcggcagtggcggaagttggctggtgacactaatccggcgttgggtaggcgtctgaattttgggactgtgtcggatgagcatgagtcgatgtctgctgccgggtttgctcgggagcggcttggctggtgggatcgtggccagtctgcttcgtcagtgattccggcggataagtgggtccagtcggctgtggatgaggctagtctggttggcgggaaagtgtttggtgtctcgttttctcgttctggggatcgggttgctttggtgggtgccggccggactgatgctggggttcatgttgaggttattgatgggctgtcgggaacgattgttgatggtgtgggccagctggctgactggctggcgttgcgttggggtgacacggaaaagatcatggttgccggttcgggtgctgtgcttttgcaaaaggctttaagtgatcgtggtgtcccgggccgtggcgtggtggttgccgatactggggtgtatgtggaggcgtgtcaggcgtttttggagggtgtcaggtcgggtgtgatcagtcatcctcgtgctgattctcgccgtgacatgttggatattgctgtgaggtcggctgtgcagaagaagaaaggttctgcgtggggttggggttccttgtttaaggatggttctgaggttcctttggaggctgtgtctttggcgtatcttggtgcgaagatggcgaaagcgaagcggcgtgagaggtctggtaggaagcgggtgtctgtggtatgaactcggatgagttggctctgattgagtgcatgtacgatcgtatccaaaggttgtcttcatggcattgtcgtattgagggctactatgagggctcgagccgggtgcgtgatttgggtgtggctattccgccggagttgcagcgggtgcagactgtggtgtcgtggcctggtatagccgtggatgctttggaggagcgtctgggttggcttggctggactaacggtgacggctacggcctggatggtgtgtatgcggcgaatcggcttgctacggcgtcgtgtgatgttcatttggatgcgctgatttttgggttgtcgtttgtggctgttattccccaaggcgatgggtcggtgttggttcgtccgcagtcacccaagaactgtacaggccggttttcggctgacgggtctcgtctggatgctggctttgtggtgcagcagacgtgtgatcctgaggttgttgaggcggagttgttgttgcctgatgtgattgttcaggtggagcggcgaggtagccgtgagtgggttgaggtggatcgtataccgaatgtgcttggggcggttccgttggtgccgattgtgaatcggcgtaggacgtcgcgtattgatgggcgttcggagattacgaggtctattagggcttacacggatgaggctgtgcgcacactgttggggcagtctgtgaatcgtgacttctatgcctaccctcagcgttgggtgactggcgtgagcggggatgagttttcgcagcctggctgggtcctgtcgatggcttctgtgtgggctgtggataaggatgatgacggtgacactccgaatgtgggatcgtttcctgtcaatagtcctacaccgtattcggatcagatgcggctgttggcgcagttgacggctggggaggctgcggttccggaacgctatttcgggtttatcacatcgaatccgccatctggggaggcgcttgcggctgaggagtctcggcttgtgaagcgtgctgagcggcgtcagacgtcgtttggtcagggctggctgtcggttggtttcctggctgccaagtcgcttgattaatacggtaacgaagctgatttttttgttgatgttggtttgcggtggcgtgatgcatcaacacctactcgggcggctacagcggatgctgtgacgaagcttgttggtgccggtattcttcctgcggattctcggacggtgttggggatgttgggtttggatgatgtgcaggttgaggctgtgatgcgtcatcgtgccgagtcgtctgatccgttggcggcgctggctggggctatttctcgtcaaactaacgaggtttgatgaatggcttcgggtgttgcgtcgaggctggctgctgccgggtatcagcgtgaggcgattcgttttgccgggaagtatgcgggctattatgctgagcttggtcgtttgtggcattccgggaagatgacagatgcgcagtatgtgcgtttgtgtgtggagttggagcgtgccggccatgacggttccgcggcgctggcgggcaaattcgtttcagattttcggaagcttaacggtgtggatcctggtttgattgtgtatgacgagtttgatgctgccgccgcgttggctaggtcgttttcgactatgaagatgatgaatagtgacccggatagggtgaatgatacgattgatgcgatggctgcgggtgttgatcgggctgttatgaatgctggccgtgacacggttgagtggtctgctggtgcgcagggtaggtcgtggcgcagggtgactgatggtgatccgtgcgcgttttgtgccatgttggctacgaggtcggattatacgactcgggaaagggcgcttactactggtcatactcggcgtcataagcgtgccggtaagcgtccgtttggttcgaagtatcatgatcattgtgggtgtacggtggttgaggttgtggggcgttgggagccctcctctgcggacaccgcatatcagcgggtttatgagaaggctcgtgagtgggttgatgatcatgggttgcagcagtcgcctggcaatattttgaaggctatgcgtactgttggcgacatgagatgatggtttccggttgtgtaccgccggttatcggtgcacaggtttgtctcccgcacgggggtcaacaatgttgtgttgttttccgcaaggagtgttaggttaggctatggccgatcagagtgttgaggaacagaatgtcgacaatgatgttgttgagcccggaaagggtggagacattgttgatgttgtgaaggatgatcaaagcgggcaggcaggcgatcagtcgaagcatgatggtgtagataagccgtctggcacggattggaaggctgaggcccgtaagtgggagtctcgtgctaaaagtaatttcgccgagttggagaagcttcgcgcctcggatggtgatgcggggtctgtgattgatgatcttcgccgcaagaatgaggaactcgaagaccggatcaatgggtttgttcttaagggtgtgaagcgtgctgttgcggccgagtgtggcttgtcgggtgatgcggtcgctttcttgcacggtagcgaccgtgaagcgctggtggagtctgctaaggctttgaagggtttgatcgaccatagtagtggtggcgcgggtgtgcgccgtcttgcggggagtgcccccgtggatgatgttaaacgacgtgagggtgtcgcttttgttgatgctcttgtcaataattctaggagatgatttgtgatggctgatgattttctttctgcagggaagcttgagcttcctggttctatgattggtgcggttcgtgatcgtgctatcgattctggtgttcttgctaagctgtcgcctgagcagccgactatttttggtccagtgaagggtgccgtgttttcgggtgttcctcgcgccaagattgttggtgagggtgaggttaagccttccgcttcggttggtgtttcggcgtttactgcgcagcctatcaaggttgtgactcagcagcgtgtctcggacgagtttatgtgggctgatgctgattaccgtctgggtgttttgcaggatctgatttcgcctgctttgggtgcttcgattggtcgcgccgtggatctgattgctttccatggtgttgatcctgccactggtaagcctgccgcggctgtcaagacttcgctggataagacgaagcatattgttgatgctacggattctgctacgactgatcttgttaaggctgtcggcctgatcgctggggccggtttgcaggttcctaacggtgttgctttggatccggcgtttgcttttgctctgtcgactgaggtgtatccgaaggggtcgccgcttgccggtcagccgatgtatcctgccgccggtttcgctggtttggataattggcgtggccttaatgttggtgcttcttcgactgtttcgggtgccccggagatgtcgcctgcctcgggtgttaaggctattgttggtgatttctctcgtgttcattggggtttccagcgtaatttcccgatcgagcttatcgagtatggtgacccggatcagactggccgtgacctgaagggccataatgaggttatggttcgtgccgaggctgtgctgtatgttgcgattgagtcgcttgattcgtttgccgtggtgaaggagaaggctgccccgaagcctaatcctctggctggtaactgattcatttgttgcgataatgtttatgctgtgtgcagggggtggtgttgttgggtatcattttgaagcctgaggatattgagcctttcgccgatattcctagagagaagcttgaggcgatgattgccgatgtggaggctgtggctgtcagtgtcgccccctgtatcgctaaaccggatttcaaatatagggatgccgctaaggctattctgcgcagggctttgttgcgctggaatgataccggggtttcgggtcaggtgcagtatgagtctgcgggcccgtttgctcagactacacggtctaatactcccacgaatttgttgtggccttctgagattgctgcgttgaagaagttgtgtgagggtgatggtggggctggtaaagcgttcactatcatacccactattaatggtcgatatgtacattctgaggtgtgttccacggtgtggggtgagggttgctcgtgcggatctgatattaacggctacgctggtcctttgtgggagatatgatatgaccagttttccttacggtgaaacggttgtgatgcttcagccgactgttcgcgtcgatgatcttggcgacaaggtggaagactggtctaagcctgtcgagactgtgtaccataacgtggccatctatgcttcgttgtcgcaggaggatgaggccgcggggcgtgactcggattatgagcattggtcgatgctgttcaagtcccctgttgtgggtgctgattatcgttgcaggtggcgtatccggggtgttgtgtgggaggctgacgggtctcctatcgtgtggcatcatccaatgtctggctgggatgcgggcacgcagatcaatgtgaagcgtaagaagggctgatgggtagtggctcaggatgtgaatgtgaagctgaacttgccgggtattcgtgaggtgttgaagtcttctggggtgcagggcatgttggctgagcgtggcgagcgtgtcaagcgtgcggcctcggcgaatgtgggcggtaacgctttcgataaggcccaataccgtaatggtttgtcgtcggaggtgcaggttcaccgtgtggaggctgtggcccgtattggcaccacctataagggtgggaagcgtattgaggcgaagcatggcacgctggctaggtcgattggggcggcgtcgtgatcgtctacgatgaccccaggaagtgggctaaacgcgtgctcaaggatgatggctggctgtctgggataccatgcaccgggacagtgccggatagctttgagggtgaccttgtttggttggctcttgatggtggcccgcagttgcatgtgcgtgagcaggtttttttgcgggtgaatgtgttttctgatacgccggatcgggctatgtctttggcgcgtcgcgttgaggctgtccttgttgacggggttgatggtggcccggtggtgtactgtaaacggtctactggccctgatttgctggttgatggtgcacgttttgatgtgtattcgctttttgagctggtgtgtcggcctgtcgaatccgagtaagcgtatcgttgtttttgttgattgatttttagtttgattgtttttgggggttatgatggctgcaacacgtaaagcgtctaatgttcgctctgctgttacgggtgacgtctatattggtaaagctcatgccggtgacgctattgatggtgtgaagacggttcctgaggggttgactgctttagggtatctgtctgatgacgggtttaagattaagcctgagcgtaaaacggatgatttgaaggcttggcagaatgcggatgttgttcgcacggtggctacagagtcgtctatcgggatttctttccagctgatcgagtctaagaaggaggttatcgagctgttttggcagtcgaaggttactgccggatccgattcgggttcgttcgatatttctcctggtgctaccactggcgtgcacgctttactgatggatattgtggatggcgatcaggttattcgctactatttccctgaggttgagttgatcgatcgtgacgagattaagggtaagaatggcgaggtgtatgggtatggtgtgacgttgaaggcgtatcctgcccagattaataagaagggtgatgcggtgtctggtcgggggtggatgacggctttaaaagctgatacccctccggttcctccgaagcctcagccggatccgaatccgccgtccgataactgatacacgattttagggattgttgatagatgagtgatactggtttcacgttgaagattggtgaccgtagctgggtgttggcggatgcggaggagacggctcaggctgttcctgctcgcgtgtttcgccgtgccgctaagattgcccagtcgggtgagtctgcggatttcgcccaggttgaggtgatgttttctatgttggaggctgccgccccggctgacgcggtggaggccctgaggggcttcctatggttcgtgtggcggaggttttccgtgagtggatggaatacaagcctgaaggtaagggtgcctcgctgggggaatagtttggctccacggcctgattgatgattatcgtggggccatcgaatacgatttccgcaccaagtttggtgtttctgtttatagtgttggtggcccgcagatgtgttggggtgaggctgtccggctggctggcgtgtggtgtaccgatacgtctagccagttggcggcccacctgaatggttggcagcgcccgtttgagtggtgcgagtgggctgtgctggacatgttggatcattacaggtntgctaatagtgaggggcagccggagcctgtggcgaggccgacggatgagcgtagggcccggtttacgtctgggcaggtggacgatattttggcgcgtgttcgtgctggtggcngggtgtctcgcgagattaatattatggggtgaatagtgtatgtctggtgagattgcttccgcatatgtgtcgttgtatacgaagatgccgggtttgaagtctgatgttggtaaacagttgtcgggtgtgatgcctgctgagggtcagcgttcgggtagcctgtttgctaagggtatgaagttggctttgggtggcgcggcgatgatgggtgccattaatgttgctaagaagggcctcaagtctatctatgatgtgactattggtggcggtattgctagggcgatggctattgatgaggctcaggctaaactgactggtttgggtcacacgtcgtctgacacgtcgtcgattacgaattcggctattgaggctgtgacgggtacgtcgtatgcgttgggggatgcggcgtctacggctgcggcgttgtctgcttcgggtgtgaagtctggcgggcagatgacggatgtgttgaagactgtcgccgatgtgtcttatatttctggtaagtcgtttcaggatacgggcgctatttttacgtccgtaatggctcgcggtaagttgcagggcgatgacatgttgcagcttactatggctggtgttcctgtgctgtctttgcttgccaggcagacgggtaaaacctcggctgaggtgtcgcagatggtgtcgaagggacagattgattttaacacgtttgcggctgcgatgaagcttggcatgggtggtgctgcgcaggcgtctggtaagacgtttgagggcgctatgaagaatgttaagagcgccctgggttatcttggtgctacggctatggcgccgtttcttaacgggttgcggcagatttttgttgcgttgagtccggttatcaagtcggtgacggattctgtgaagccgatgtttgcgtcggtggatcagggtattcagcggatgatgccgtgtattttggcgtggattaaccgtatgccggccatgattacgagaatgaatgcacagatgcgcgccaaggtggagcagttgaagggcagttttgcgagaatgcatttgcctgtccctaaagtgaatttgggtgccatgtttgctggcggcaccgcagtgtttggtattgttgctgccggtgtggggaagcttgttgcagggtttgccccgttggcggtgtcgttgaagaatctcctgccgtcatttggtgctttgaagggtgccgctggcgggcttggcggcgtgtttcgcgccttaggtggccctgtcggtattgtgatcgggctgtttgcggcaatgtttgccacgaacgcccagttccgtgccgcggtgatgcagcttgtggctgtggttggccaggcgttgggccagatcatggctgctgtgcagccgctgttcgggattgttgctggtttggtggcacggttggctcccgtttttggccagattatcggcatggttgccggtttggctgcccagttgatgcctgtgattggtatgctggtggcccggctggtgcctgtgatcacgcagattattggtatggtgacgcaggttgcggccatgttgctgcctacgttgatgccggttattcaggctgttgttgctgtgatacggcaggttgttggtcttatccggtcgctgataccagtcatcatgtcgattatgcgtgtggtggtgcaggttgttgcggttgtgatacaggtggtggcccgtattcttgcggttgtggctccgatggtggctgctgtggtggggtttgttgcccgtattgttggtgctgtcgtgtcggctgtggcccgtgtgattgctgctgttgcccgtgtcgtctcatgggttgtggcccatttggtgtctggtgtggcgcatatgggttcggctatactgaatggctggaaacgtattagggcgtttacgtctgcgtttatgagcgggtttaagtcgctcatttctgccggtgtgggcgctgttgtcgggttttttgcgcggcttggtttgtcggttgcttcccatgttcggtctgggtttggcgcggctcgtggtgctgtttcggctgcgatgaatgggattcggagtgttgtgccttcggtggtgtccgcggtgggctcgttttttggttcgatggcttctagggttcgtggtgctgcctcgtctgggtttaacggggccaggagtgtggcttcttctgctatgcatgctatggggtctgcggtgtctagtggtgtgcatggtgtgctgggttttttccggaatttgcctggcaatattcggcgtgcgcttggtaatatggggaccctgttggtgtctgctggccgggatgtggtgtctggtttgggtaatggtatccggaatgctatgagtggcctgttggatacggtgcgtaatatgggttctcaggttgctaatgcggcgaagtcggtgttgggtattcattccccgtctagggtgtttcgtgaacaggttggccgccaggttgttgccggtttggctgaggggatcaccgggaatgccggtttggcgttggatgcgatgtcgggtgtggctggtcggttgcctgatgcggttgatgcccggtttggtgtgcgatcgtcggtgggctcgttacaccgtatggcaggtatcagcgcatgaatgataagagtgttgtggtgaatgttaacgggccaacctatggggatcctaacgagtttgcgaagcggattgagcggcagcagcgtgacgcgttgaacgcgttggcttacgtgtgattgcggggtgtggttcatgtttattcctaacccgtctgatcgtgccggtttgacggtggattggacgatgtttccgttgatcggtaataatccggagcgtgttcttcatttgacggattatacgggtgcgtccccggtcatgttgttgaatgattcgttgcgcggtttgggtgttcctgaggtggagcatttttctcaaactcatgttggggtgcacggctcggagtggcgcgggtttaatgtgaagcctcgcgaggtgacattacctgtgttggtgtcgggtgttgacccggatccggtgggcgggtttcgtgacggttttttgaaagcctatgacgagttgtggtctgcttttcctccgggcgaggagggggagttgtcggtgcggaccccggcgggtgttgagcgtgtgttgaagtgccggtttgattcggcggatgacacgtttacggttgatccggttaatcgtggctatgcgcgctatctgttgcatttgacagcctatgacccgttttggtatggggatgagcagaagtttcgtttcagtaacgcgaagttgcaggattggttgggtggcggccctgtcggcaaggatggtacggcgtttcctgtggtgttgacgcctggtgtgggctctggttgggataatctgtctaataaggctcatgtgcctg

SEQ ID NO: 4 - DNA, 1909 bp, unidentified
  source 1..1909: mol_type = unassigned DNA
ccctaatacgattccagccagcctgaaccaccgaacccatacgcgccaaaccagacacaaaatgggccacaacccacccaacaacacgggcaacagcagcaaaaacacgggccacagccgacacaacagcaccaacaatacgggcaacaaaccccaccacagcagccaccatcggagccacaaccgcaagaatacgggccaccacctgtatcacaaccgcaacaacctgcaccaccacacgcataatcgacatgatgactggtatcagcgaccggataagaccaacaacctgccgtatcacagcaacaacagcctgaataaccggcatcaacgtaggcagcaacatggccgcaacctgcgtcaccatgccaataatctgcgtgatcacaggcaccagccgggccaccagcataccaatcacaggcatcaactgggcagccaaaccggcaaccatgccgataatctgggcaaacactggcgccaaccgtgccaccagccccgcaaccaaaccaaacagcggctgaagagcggccataatctggcccagggcttggccaaccacagccacaagctgcatcacagcggcacggaactgggcgttcgtagcaaacatggcagcaaacagcccgatcacaacaccgacagggccacccagggcacggaacacgccgccaagacccccggcggcacccttcaaagcaccaaacgatggtagcagattcttcaacgacaccgccaacggggcaaaccccgcaacaagcttcccaacacctgcagcaacaacaccgaacacggcggtgccgccagcaaacatggcagccaaattcactttagggacaggcaaatgcagcctcgcaaaaatgcccttcaactgctccgccttggcgcgcatctgtgcattcattcgtgtgatcatagccggcatccggttaatccacgccaaaatagacggcatcatccgctgaataccctgatccaccgacgcaaacaggggcttcacagaatccgtgacagacttaataaccggattcaacgcaacaaaaatctgccgcagaccgttaagaaacggcgccatagccgtagcaccaagataacccagggcacccttaacattcttcatagcgccctcaaacgtcttaccagacgcctgcgcagcaccacccatgccaagcttcatcgcagccgcaaacgtggcaaaatcaatctgccccttcgacaccatctgcgacacctcggccgacgttttacccgtctgcctggcaagcaaagacagcacaggaacacccgccatcgtaagctgcaacatgtcatcgccctgcaacttaccgcgagccatcacagacgtaaaaatagcgcccgtatcctgaaacgacttaccagaaatataagacacatcggcgacagtcttcaacacatccgtcatctgcccgccagacttcacacccgaagcagacaacgccgcagccgtagacgccgcatcccccaacgcatacgaagtaccagtcacagcctcaatagccaaattcataatcgaagacgtgtcagaagacgtgtgacccaaaccagtcaacttcgcttgggcctcatcaatagccatagcgcgagctataccgccaccaatagtcacatcataaatcgacttgaggcccttcttagcaacgttgacggcacccaccattgcggcgccacccaaagccaacttcatacccttagcaaacaggctacccgaacgctgacccacagcaggcatcacacccgacaactgattaccaacatcagacttcaaacccggcatcttcgtatacaacgacacatacgcggaagcaatctcaccagacatacactattcaccccataatattaatctcgcgagacaccccgccaccggcacgaacacgcgccaaaatat

SEQ ID NO: 5 - DNA, 2184 bp, unidentified
  source 1..2184: mol_type = unassigned DNA
gggtatgaagttggctttgggtggcgccgcaatggtgggtgccatcaacgtggctaagaagggtctcaagtctatctatgatgtgactattggtggcggtattgctagggcgatggctattgatgaggctcaggctaagttgactggtttgggtcacacgtcttctgacacgtcttcgattatgaattcggctattgaggctgtgactggtacgtcgtatgcgttgggtgatgcggcttctactgcggcggcgttgtctgcttcgggtgtgaagtctggcgggcagatgacggatgtgttgaagactgtcgcggatgtgtcttatatttcgggtaagtcgtttcaggatacgggcgctatttttacgtctgtgatggctcgcggtaagttgcagggcgatgacatgttgcagcttacggtggcgggtgttcctgtgctgtctttgcttgccaggcagacgggtaaaacgtctgctgaggtgtcgcagatggtgtcgaaggggcagattgattttgccacgtttgcggctgcgatgaagcttggtatgggtggtgctgctcaggcgtctggtaagacgtctgagggcgctatgaagaatgttaagggcgctttgggctatcttggcgctactgctatggccccgtttcttaacgggttgcggcagatttttgttgcgttgaatccggttatcaaatcggttacggattctgtgaagcctttgtttgcgtcggtggatcagggtattcagcggatgatgccgtctattttggcgtggattaaccgtatgccgggcatgatcacgagaatgaatgcacagatgcgcgccaaggtggagcagctgaagggcatttttgcgagaacgcatttgcctgtccctaaagtgaatttgggtgccatgtttgctggcggcaccgcagtgttcggtattgtggctgccggggtggggaagcttgttgcagggtttgccccgttggcggttgcgttgaagaatctactgccgtcgtttggtgctttgaagggtgccgctggcgggcttggcggcgtgtttcgcgccctgggtggccctgtcgggattgtgatcggcttgtttgctgccatgtttgccactaacgcccagttccgtgccgctgttatgcagcttgttggtgtggttggccaggctttggggcagatcatggctgctgtgcagccgctgttcgggattgttgctggtctggtggcacggttggctcccgtttttggccagattattggtttggttgccgggttggctgcccagttgatgcctgtgattggtatgttggtggcccgtcttgttcctgtgatcacgcaggttattggtatggtgacgcaggttgcggccatgttgctgcctacgttgatgccggttattcaggctgttgttgctgtgatacggcaggttgttggtcttatccgggcgctgataccagtcatcatgtcgattatgcgtgtggtggtgcaggttgttgcggttgtgatacaggtggtggcccgtattcttgcggttgtggctccgatggtggctgctgtggtggggtttgttgcacgtattcttggcgctattgtgtctgctgcagcccggattattgggactgtcacccgtgtcatttcatgggttgtgaatcatttagtgtctggcgtgaggtctatgggcacggccatcttgaatggctggaatcatattagagcgtttacgtctgcgtttattaacggtttcaagtcggtgatttctggcggcgtgaacgcggttgtggggttttttgcccggctgggttcttcggttgcttctcatgtgaggtctggttttagcgcggctcgtggcgctgtttcttctgcgatgaatgctatccggagtgttgtgtattcggtggtgtccgcggtgggctcgttttttggttcgatggcttctagggttcgtggtgctgcctcgtctgggtttaacggggccaggagtgtggcttcttctgctatgcatgctatggggtctgcggtgtctagtggtgtgcatggtgtgctgggttttttccggaatttgcctggcaatattcggcgtgcgcttggtaatatggggtccctgttggtgtctgctggccgtgatgtggtgtctggtttgggtaatggtatccggaatgctatgagtctgtctcttatacacatctgacg

SEQ ID NO: 6 - DNA, 1031 bp, unidentified
  source 1..1031: mol_type = unassigned DNA
cccctcaaaaacctgtactgcaccgacacaacaatggcacccaaaccaaccatctcaatattcacactcttagaaccgccaggcgggataggggcaaactcccactccttcaaacgatccatcacatcctcaaacccgttcaacaatgcagactgtttgcgaggatccgtatcaatagtgatccaatcatactcctcgacaggatagtccgaagacacacgcaaaccatcaatctgcacagaccacgactccaaaggcccctcaacacgaatcacaggccacgcaggcacatcacccttattagacaggttatcccaaccagaaccaacaccaggcgtcaacaccaccggaaacgcagtacccttcttattaacagggccgccacccaaccaatcctgcaacttcgcgttactgaaacgaaacttctgctcatccccataccaaaacgggtcataggctgtcaaatgcaacagatagcgcgcatagccacgattaaccggatccaccgtaaacgtgtcatccaccgaatcaaaccggcattttagcgcacgctcaacaccggcaggagtcttcaccgacaactccccctcctcgcccggaggaaaagcagaccacaactcgtcataggctttcaaaaaaccgtcacgaaacccgcccaccggatccgggtcaacacccgacaccaacaccggcagcgtcacctcgcgaggcttcacattaaacccgcgccactccgagccgtgcaccccaacatgtgtttgagaaaaatgctccacctcaggaacacccaaaccgcgcaacgaatcattcaacaacatcaccggagacgcacccgtataatccgtcaaatgaagcacacgctcgtcgccagacagcggatccataaaccatgtcacagtcaaacccgaacgatcagacgggtcaggaataaacatgcacaacaccccaatcacacgtaagccaacgcgttcaaagcgtcacgctgctgccgctcaatccgcttcgcaaactcgttaggatcaccataagta

SEQ ID NO: 7 - DNA, 1357 bp, unidentified
  source 1..1357: mol_type = unassigned DNA
gaagcatagatggccacgttatggaacccagtctcgacaggcttagaccagtcttccaccttgtcgccaagatcatcgacacgaacagtcggttgaagcatcacaaccgtttcaccataaggaaaactggtcatatcatatctcccacaacgggccatcatggccgttaatgttagacccgcacgagcagccctcaccccacaccgtggaacacacctcagaatgagcatatccaccacgaatcgtgggtgtgatcgtgaacgctttaccagccccaccatcaccctcacacaacttcttcaacgcagcaatctcggaaggccacaacaaattcgtgggcgtattagaccgtgtagtctgggcaaaaggacccgcagactcatactgcacctgccccgaaaccccggtatcattccagcgcagcaaagccctacgcagaatagccttagcggcatccttatatttgaaatccggtttagcgatacagggggcgacactgacagccacagcctccacatcggcaatcatcgcctcaagcttctctctaggaatatcggcgaaaggctcaatatcctcaggcttcaaaatgatacccatcaacaccaccccctgcacacagcataaacattatcgcaacaaatgaatcagttaccagccggaggattaggcttcggggcagccttctccttcaccacggcaaacaaatcaagcgactcaatcgcaacatacagcacagcctcggcacgaaccataacctcattatggcccttcaggtcacggccagtctgatccgggtcaccatactcgataagctcgatcgggaagttacgctggaacccccaatgaacacgagagaaatcaccaacaatagccttaacaccagaggcaggcgacatctccggggcgccagaaacagtcgaagaagcaccaacattcaggccgcgccaattatccaaaccggcaaacccggcggcaggatacatcggctggccggcaagcggagaccccttcggatacacctcagtcgacagagcaaacgagaacgccggatccaaagcaacaccgttaggaacctgcaaaccagcaccagcgataaggccgacagccttaacaagatcggtcgtagcagaatccgtggcatcaacaacatgcgtcgtcttatccagcgaagacttgacagccgcagcaggcttacccgtagccggatcaacaccatggaaagcaatcagatcaacagcgcgaccaatcgaagcaccaagagccggggaaatcagatcctgaagcacacccagacggtaatcagcatcagcccacataaactcgtccgagacacgctgctgagtcacaaccttaatag

SEQ ID NO: 8 - DNA, 1122 bp, unidentified
  source 1..1122: mol_type = unassigned DNA
ggcgacatctgtggttgtgggtggccgcggcgagggccgggatcggctgttttgtgaggatgttgattcgatggccgaggatgactggtttgatcgtgtcgaggtgtttaaggatgcccgtaacacggattctgagcatgtgcatctcatcgatgaggctgagcaggtgctgtccgagttgggggccacgtcggggtttaagattgaattggctgagtcggaggtgttgcgttttgggccaggcaatctgatgccgggtgatttgatctatgtggatgtgggttcgggccctattgcggagattgttcagcagattgatgtggagtgtgtatcgcctggtgatggttggacgaaggtgactccggttgcgggggattatgaggataatccgtcggccctgttggctcgccgtgtggctggtttggctgcgggtgtgcgggatttgcaaaaattttagaaaagaattggtggtttgttgtgggtattgtgtgtaaagggtttgatggtgtgttgaccgagtatgattgggctcaaatgtctggtctgatgggtaacatgccttcggttaaggggccggaggattttcgtgtcggcactactgttcagggtgccacggtgttgtgtgaggttttgccggggcaggcttgggctcacggggtgatgtgcacgtcgaatagtgttgagacggtgacgggccagctgccgggccctggtgagacccgctacgactatgtggtgttgtctcgggattgggagcagaacacagccaagttggagattgttcagggtggccgtgcggagcgtgcccgtgacgtgttgcgtgccgagcctggcgtgtaccatcagcagctactggctactttggtggtgtcgtctaacgggttgcagcagcagttggataggcgtgctgtggcggctagggttgcgtttggggagtctgctgcgtgtgatcctacccctgtggagggtgaccgtntgatggttccttctggggctgtgtgggctaaccattcgggcgagtggatgctactgtctccgaggattgagacgggttcgaagtctatcatgtttggtggatcgaacgtgtatgcttacacgatcccgttcgagcggccgtttact

SEQ ID NO: 9 - DNA, 1324 bp, unidentified
  source 1..1324: mol_type = unassigned DNA
ctattacaccgaccatgaggagtagtgtgaatcattctgaggtgtgttccacggtgtggggtgagggttgctcgtgcgggtcgaatattaacggctacgctggccctttgtgggagatatgatatgaccagttttccttatggtgaaacggttgtgatgcttcaaccgactgttcgcgtcgatgatcttggtgacaaggttgaggattgggggcatcctgtagaaaccgtgtaccataacgtggccatctatgcttccgtttcacaggaggatgaggccgcggggcgtgactctgactatgagcattggtcgatgcttttcaagcagtctgttgtgggtgctgattatcgttgccggtggcgtattcggggtgttgtgtgggaggctgacgggtctcctatgatgtggcatcacctaatgtccggttgggatgcgggcacgcaggttaatgtgaagcgtaagaagggctgatagattgtggctcaggatgtgaatgtgaagctgaacttgccgggtattcgtgaggtgttgaagtcttctggggtgcagggcatgttggctgagcgtggtgagcgtgtcaagcgtgcagcctctgcgaatgtgggcggtaacgctttcgataaggcccaataccgtaatggtttgtcgtcagaggtgcaggttcaccgtgttgaggctgtcgctcgtataggcaccacatataagggtgggaagcgtattgaggcgaagcatggcacgctggctcgttcgattggggctgcgtcgtgatcgtctacgatgaccccaggaagtgggctaaacgcgtgctcaaggatgatggctggctgtctgggataccttgtactgggacagtgccggatagttttgagggtgaccttgtttggttggctcttgatggtggcccgcagttgcatgtgcgtgagcaggtttttttgcgggtgaatgtgttttctgatacgccggatcgggctatgtctttggcgcgtcgcgttgaggctgtccttgttgacggggttgatggtggcccggtggtgtactgtaaacggtctactggccctgatttgctggttgatggttcacgttttgatgtgtattcgctgttcgagctgatatgtaggcctgcggagtccgaataagcttattgtttttgttttaatgtaattgtttgatatttaatgggggttatgatggctgcaacacgtaaagcgtctaatgttcgctctgctgttacgggtgacgtctatattggtaaagctcatgccggtgacactattgatggtgtgaagacggttcctgaggggttgactgctttagggtatctgtc

SEQ ID NO: 10 - DNA, 1069 bp, unidentified
  source 1..1069: mol_type = unassigned DNA
gtgtcgaatcgtccgacgcagtggcagtagtcgtacatgagtttaataatgtgttggtggtcgccaaggtaggggtttgcgctgatgctgtaggtggctgtgccgtctttgctaatagtgtatttggcggtgatggtttgggggttttctgtgttggtgataattgctgtggtggtggcgcctacggtttggaggacggtggtttgggttccgtcgtctagtgttgtggtaaccataattggggttctcctttagatgcttgtctggtggtcggctagatgaataatatcggataaaggtttcggttggtctaggtgttgtatggttttgttggctagccgtttggctgccctgtaacacattttggtgtagtgtttgttgtctaggttgtggtattgttcacgtaccgcaatatatagtagagagtcttggtacaggtcgtcggggttgacggccgggtagtggcgggcaatgttggtgcaagctttgtgtagctggtgttggtggtggtgggttgcccacccccagttggcggtggtggcttgttggactttggttggtcgtctactcatggtttttatctcgctatctgatagttgtttggtgttttgttgttgatagtgtagcacactagtccggggtttccggtggtgcctgtgcggtgccggtaccagactgattctccttccatggatgggcattggatgaaggtgcgttgtccttgctcggagatttctaggtggtgccggtggcctgccatcaggatgtgtgatgtggtgccgttgtggaattcttggccgcgccaccattcgtagtgtttgccggtgcgccattggtgtccgtgggcgtgcaggatggtagccccggctacgttgacggtggtggtcatttcgtcgcgttgggggaaataatagtggaggttggggtagttgttggtgagttggtaggcttctgcgatggcgcggcagcagtccacgtcgaatgaatcatcgtaggtcgtgacgcctttgccgaatctaacggcttctccgtggttgccgggcatggaggtgaccgtaaggtaggacca

SEQ ID NO: 11 - DNA, 1224 bp, unidentified
  source 1..1224: mol_type = unassigned DNA
cgtgtttgggcgcagcttgtggagttcggcttccacgctctgccggtaggcttcggcgaggccctcaaaatccatgtggtcgcaggagaggttttcgaggcgtgtcaggtcgaagggtgtggggcagtcgtagctggcgggggtgtagagctgggtgaagtggttggcgatcttctgcatgactggttcctttctggtgtgtggatggtttttatcgtgtggcttcggcgatgatggcgtccacatcgattgtgtcgatcatgtcgtggagttcctcagtctcatctggggtgagtggctgccagttgcgtggcccatacactgcaccgtcgagagtgatggtccacaggggtcggatgagtcgtacggcttcttcgactttggcacggtataggcggcagatgatagacgtgtgggtgttacctatgtcacatcctgccaggtgtgtggggtggagtgggttgatttctgtttgcccgtagaggctggtgaaggatggggtgatgagtgtggtggccatttttggtgtgttcctttcggtggtgtatgggttgttgtggtttctagagtgtgtaggttgcaaccgggagtcaaggctgcgctcaaccggattgagcgtttcatgctggagtgtcgggtgtgacagatgccacttaagcctttatggcatccctcagcgtctcaaatcttctgggggtaggattatgcagggttggccctgctgatcgattctagggccttctagggcgtctcaggggtatgtctgggtgatagcaggtccggtagatgacccggcagatctaccttggctttcatcacgggggtcgagatgccatatctggacatggaatctaaaccctcatactgtgtgagatgtatcacactcgcctagtatggtgtgcaccctcgaggctactctgtcgatcttgcgtggagggtgtagcccagaaatgccgtttaaagcttcaggggtacgcctaggagcgccttacaggatggtggctaggtatttataccaccaagcaattctgatcgattctagacgcctccaggagactgatacgcgatccgctatccagacgccgaccaccagcccctatcctggttagctaagcctcaactatgtggacagtgtgggatactgtggggggagaaggacgcggtaaaagaaagaggggggcatcagccttagggtcttagcactgatggacttagcaccgagcc

SEQ ID NO: 12 - DNA, 1266 bp, unidentified
  source 1..1266: mol_type = unassigned DNA
catcggcgcccacaaagactcctttactttcgcctacggtgccaccaccaagcaacccggagcatccaaggcacaattgaaagtcttctgccaagtctctggcaccgaagacaagccgcaggtagaggacatgtccatcaacccttcacgctaacccgaaagacaacacacccattatgcctctcatgtccacctacatggctaatgcgggcctgtccgacatcatgcacatcctccataccgccgggggagcctgccggacaggcaccgacatcgccgcacgaatcaacacactccacccagaatacaatctccaagccaccaccgaccagctcatcgacatcgaaaaccgcatcgacactattcgcaaaaacattcaaaaagaaatcaagaaacacccgtgaacatcaccgaccacaccaccccagacctgcactcctacgaaacgttcttcaccagcctcgcatggatccaaggcggcatcatcacatggatgtacgcaaccggcaccccacacaaggcagccctcgccattattgccgcatgcgccctcgccaccctcctgggtgcatcaacactcacatacaagcccaaagacagcaaatgatcacaacacccatactgatcgctgaaaccctcgccataattattctcgcagtagcactcgcccacaacaacaaccagtaacccacccttaaggagcacacatctcatggatgagcccacccgcatgtacaccgaccccaacaccggtgcccgaaaagaattgaaactctgcaggctctccctcatcgaccccgcatcccttcacgctctcggcgaagtagcaggctacggtgccaccaaatacggcgacaacaactggaccggaggatacccgtggagccacagtgtcgacgccctctaccgccacctactatcatggcagcaaggcaacaacctcgaccgcgaatccgggctaccccatttggcacacgccgcctggcactgcctcgcactcctcgcataccagcaacacaatgccggggtagacacccgcaacccatggaacacccacaaaggcgaccagtaatgcctctagcacaatacccgaaaaccatccaccatccaggccacatctcctactcatcactgtcacagtgggccgaatgcggagaaaaatggcgcctatcccacggctaccacacccaacaccacacctggtacgccaccatcgccggaagcgccatacaccacatcaccgaacaatacgacctacacctgtac

SEQ ID NO: 13 - DNA, 1481 bp, unidentified
  source 1..1481: mol_type = unassigned DNA
gtctggggccacgtcggggtttaagatcgagttggcggagtcggatgtgttgcggtttgggcccggcaatctgatgccaggggatttgatctatgtggatgtgggctcgggtcctattgcggagattgttcggcagattgatgttgagtgtgtatcgcctggggatgggtggacgaaggtgacaccggttgccggtgattatgaggataatccgtcggctttgctggctcgccgtgtggctggtttggctgccggtgtgcgggatttgcaaaaattctagaatgatgggggtttgttgtggctattgtgtgtaaagggtttggtggtgtgttgaccgagtatgattgggctcaaatgtctggtctgatgggtaatatgccgtccgtgaaagggccggacgattttcgtgtcggcacgacgattcagggtgccacagtgttgtgcgatgtcctgccggggcaggcttgggctcacggggtgatgtgcacttctagtagtgttgagacggtgacagggcagctgcctggccctggtgagacccgatacgactatgtggtgttgtctcgggattgggagcagaacacagccaagttggagattgttcagggtggccgtgcggagcgtgcccgtgacgtgttgcgtgccgagcctggcgtgtaccatcagcagctactggctactttggtggtgtcgtctaacgggttgcagcagcagttggataggcgtgctgtggcggctagggttgcgtttggcgagtctgctgcgtgtgatcctacccctgtggagggtgatcgtgtgatggtgccttcgggggctgtgtgggctaaccatgccggggattggatgttgttgtctcccagggttgagacgggttcgaagtctatcatgtttggcgggtctgctgtgtatgcttacacgatcccgttcgggcggccgtttactagtccgcctatcgtggtggcgtctatggctacggctgctgggggcacgcagcagatcgatgtgaaagcctacaatgtgactgcccaaaattttggtttggcgtttattacgaatgatggttcgaagccgaatggtgtgcctggggtggctaactggattgctgtcggcgtgtgaccgggctgttgttgtggcggatgttgtgatatttgggggctgtggtgtcgtggtttactcctgcactggtggcctctatctgtaccgcattggccacggttttgggttcggttcaggctgccacatctaaatctcagaagcgtttgcggcggctgtcggctcaggtagatgcgatggaagagtatacgtggggtgtgcgccgtgaggtgcaaaggtttaacgccgggcttcctgatgatgtggagccgattcatctccctgatgtgcccgagtttttgaaagatactgttgatggtggaggtgagtagggttgagggagttggaggaggagaagcggcagcgccgcaattttgagaagttttcac

SEQ ID NO: 14 - DNA, 11424 bp, unidentified
  source 1..11424: mol_type = unassigned DNA
ggatccggtgagtcgtggctatgcgcgctatctgttgcatttgacagcctatgacccgttttggtatggggatgagcagaagtttcgtttcagtaacgcgaagttgcaggattggttgggtggcggccctgttaataagaagggtacagcgtttccggtggtgttgacgcctggtgttggttcgggctgggataacctgtctaataagggtgacgtgccggcgtggcctgtgattcgtgttgaggggcggttgtcatcgtggtctgtgcagattgatggtttgcgtgtgtcttcggactatccggttgaggagtatgattggattactattgatacggatcctcggcagcagtctgcgttgttgaacgggtttgaggatgtgatggatcgtttgacagagtgggagtttgcgcctattccgcctggcggttctcggagtgtgagtattgagatggttggtttgggtgccattgttgtgtcggtgcagtacaggtttttgagggctaggtgaatagttgatggctggtcttgttccgcatgtaacattgtttacgccggattatcgccgtgtggcgcctatcaatttttttgagtcgttgaaattgtcgttgaagtggaatggtttgtcgacgctggagttggtggtgtcgggggatcattctaggctggacgggttgacgaggcctggtgcacggctggttgttgattatggtggtggccagattttttcggggcctgtgcgcaaggtgcacggtgtggggccgtggcagtcctcgagggtgactgtgacgtgtgaggatgatattcggctgttgtggcgcatgttgatgtggcctatcaattatcttcccagttttgtgggttcggagtggcgtgcggacagggattatgcccattattcgggtccggcggagtcggtggcgaagaaggtgttgcgggataatgcttggcggtttccgccggatgtgtttctgactgatgatgagaagcgtggacggtttattaaggattttcaggtgcggtttcacgtgtttgccgataaactgttgccggtgttgtcgtgggctcggatgactgtttcggtgaagcagtttgaggatgtgaagctggatcggcgtggtttggtgtttgattgtgtgccggctgtgacccgtagtcatgtgttgactgccgagtctggttcgattgtgtcgtgggagtatgtgcgtgacgccccgaaggctacttcggtggtggttggtggccgcggcgagggtaaggataggctgttttgtgaggatgttgatagcttgtctgagggggagtggtttgatcgtgtcgaggtgtttaaggatgcccgtaacacggattctgaacatgtgcatcttattgatgaggctgagcgggtgttaggggagtctggggccacgtcggggtttaagatcgagttggcggagtcggatgtgttgcggtttgggcccggcaatctgatgccaggggatttgatctatgtggatgtgggctcgggtcctattgcggagattgttcggcagattgatgtggagtgtgtatcgcctggtgacgggtggacgaaagtaacaccgattgcgggggattatgaggataatccgtcagctttgctggcgcggcgtgtggctggtttgtctgcgggtgtgcgggatttgcaaaaattctagaatgatgggggtttgttgtggctattgtgtgtaaagggtttgatggtgtgttgaccgagtatgattgggctcaattgtctggtctgatgggtaatatgccgtctgtgaaagggccggacgattttcgtgtcggcactactgttcagggttccacggtgttgtgtgaggttttgccggggcaggcttgggctcacgaggtgatgtgcacgtcgaatagtgttgagacggtgacagggcagctgcctggcccgggtgagacccgatacgactatgtggtgttgtctcgggattgggagcagaacacagccaagttggagattgttcagggtggccgtgcggagcgtgccagtgacgtgttgcgtgccgagcctggcgtgtaccatcagcagctactggctactttggtggtgtcgtctaacgggttgcagcagcagttggataggcgtgctgtggcggctagggttgcgtttggggagtctgctgcgtgtgatcctacccctgtggagggtgaccgtgtgatggtgccttcgggggctgtgtgggctcaccatgccggcgagtggatgttgttgtcccccaggattgagacgggcactaagcaaatccagtttggcgggtctgctgtgtatgcttacacgatcccgtttgagcggccgtttagtagtgcgcccgttgtggtggcgtctatggctacggcggctgggggcacggcacagattgatgtgaaagcctacaatattactaataaggattttagtttagcgtttattacgaatgatggttcgaagccgaatggtgtgcctgcggtggctaactggattgctgtcggcgtgtgaccgggctgttgttgtggcggatgttgtgatattggggggctgtggtgtcgtggtttactcctgcactggtggcccctatctgtaccgcattggccacggttttgggttcggttcaggctgccacatctaaatctcggaagcgtttgcggcggctgtcggctcaggtagatgcgatggaagagtatacgtggggtgtgcgccgtgaggtgcgaaggtttaacgccgggcttcctgatgatgtggagccgatgcatctccctgatgtgcccgagtttttgaaagatactgttgatggtggaggtgagtagggttgagggagttggaggaagaaaaaaggcagcgccgctcgtttgagaaggcttccctgatactgttgtttttgtcgcttgtgctgttggcggtggttgccgggggtgctttacggtacgggtctgtggcttcgcaaagggattcggagcaggcgagggcccagtctaatggtacggcggctcggggtttagctgcccgtgtgaagcaggcgtgtacttcgggtggggtggagtctgcgcggcttcaccagtctggcttgtgtgtggatgctgtgcgtgttgagcgtagcgtgcagggtgtgccgggtcctgccggtgagcgcggcccgcaagggcctgcaggtgctgatgggcgtgatggtgttaatggttcggctgggctggttggccctgttggtccgcagggttctcctggtttgaatggtgtgaaaggtcctgacgggttgcctggtgtgaatggatcggatggccatgatggtgttccgggccgtgcaggtgctgatggtgtgaacggtgttgacggtcgggatggttcggccggtgagcgcggtgatgtgggcccttcaggtcctgccggcccgcaaggtgcacagggtgaacggggtgagcgtggccccgccgatgcgaacggatccgatggtaaagatggtaaggatggccgttctgttgtgtctgtgtactgttccgggggccgcctggttgtgaaatatagtgacggtacggcctctaccatagcgggttctgcagcctgcgagagtgtgaaaccatcacctgtggttaccgtatcatcccataggtgaacaagaagagggaagggtgttactagtgttggtcgtgtttggtggtggtgtgtggtgagatacattccagcggcgcaccattcggccggttcgaatagtccggtgaatagggttgtgattcacgcgacatgcccggatgtggggtttccgtctgcctcccgtaaagggcgggcggtgtccacggcaaactatttcgcgtccccatcgtctggtggttcggcgcattatgtttgcgatattggggagacggtgcagtgcttgtcggagtctacgattgggtggcatgccccgcctaacccgcattctttgggtatagagatttgcgcggatgggggttcgcacgcctcgttccgggtgccagggcatgcttacactcgtgagcagtggcttgatcctcgcgtgtggcctgcggtggagaaggctgccatgctgtgtagacgtttgtgtgacaaatataatgttccgaaaaggaaactgtcggctgccgatttgaaggctggcaggcgtggtgtttgcgggcatgtggatgtgacggatgcgtggcatcagtcggatcatgacgatccggggccgtggtttccgtgggacaggtttatggccgccgtcaacggtggtagtggtagtgaggagttaactgtggctgatgtgaaagccttgcatgatcagattaaacagttgtctgggcaggtggcccagtcggtgaaccggctgcatcacgatgttggtgtggttcaggtgcagaatggtgacttgcgtaagcgtgtcgaggctttgtcgtgggtgaagaatcctgtgacggggaagctgtggcgcactaaggatgctttgtggagcatctggtattacgtgctggagtgtcgcagccgtattgacaggctcgagtctgctgtcagcggtttgaaaaagtgatggtggtttgttgtgggtaaacagttttggttaggtttactggagcgggcggctaagacttttgtgcaaacgtttgttgcggtgttgggtgtgacggcgggtgttacttatactgcggagtcgtttcgtggtttgccgtgggagtctgccctgatcacagcaacggttgctgcggtgttgtcggttgctacctcgtttggtagcccgtcgtttgtggccggtaagccgaaggtgacgcctgttgtggatgctgggcttgttccacctgatgacgggggcttggttgagccgcactcggtggatgtgtcggatcctggcatgatcgagcctgtagacgatgctgatcttggtggctatgtgccgaggcgtgccgccgagtcggaggttggcacggtagagtctactgttgcataattgaatatgtgtgtgccccagcggtgctgccacgattgtgtggtggttgccgctggggcactatttttgtgtctataggggttttacaggttgttgtctagtgtgtcttcgatgagctggtccaggtggaggcaggctgagatagtatcgttggcctggtctagaacatcctggccgataacgcctttgtggttgtcgcggtggcggatgatagcccacatgatctcgtcggctgccgcctgtaatagttttgcctggtatgcgattccggcgagccagtctagtgcttcctggcttgcataggggctctggttctcgctgttgccgcgggtgttgctgttgtttgtggggtgtcctgcactgtcgcagaaccataggatttcgctgcactcgtctagcgtgtcttggtcgatagcgagatcgtcgaggctgacattgttgacggtaaggttaacgttgtcgagggagatgggtacaccgtactggttttcgacactgtcaacaatgttttgtagctgttgcatgttggtgggctgtagttggacgatacgatgtatcgctgtgttgagggtggtgtaggtgatattgtgtgtgttgttcatggctgttgtcccatccctgtgctgtcgtcgttgtcgtcttggtagtatcgactgtttgcgtatcctgtgagggtgatgagtgtttggtctgcccactgtttcacggtttgccgggtgactccgagacgttgggctgccaccgaataggtttggtcatacccgtatacttccctgaatgctgccaacctagctagccgtatcctttgtttgggtggctggcaggtgagggtgtagtcgtcgatggctagctgcaaatcgatcatggagacgatgttgttgccgtggtgttggggggcggttggtggtggtggcattcctggttcgacggagggtttccatgggcctccgttccagatccattgggcggcttggatgatgtcggcggtggtgtaggttcgggtcatgtgtcacccctggaacaggttgtcgaggttgtctggctggctggtggtgtcgaatcgtcccacacagtggcagtagtcgtacatgagtttgataatgtgttggtggtctcccaaataggtgtttccgctgatgctgtaggtggctgtgccgtctttactgatggtgtatttggcggtgatggtttcgggggtttctgtgttggtgatgatggcggtggtggtggcgcctactgtttgtagcctggtggtttgggtgccgtcgtcgaggatggttgtgaccattgtggttctccttagttgctggtttggttgtcggctatggctgtgatttcttggacgggtttgggtaggtataggtggtggagtgttttgtttgctagtcgttgggcgacacggtagcacatttgggtccactggttgcctgtgagttggtggtattggttgcgtaccgcaatatatagtagagagtcttggtacaggtcgtctgggttgacagccgggtagcggcgggcaatattggtgcaggctttgtgtagctggtgttggtgggctggtgtggtccatccccaatcggctgtggttgctaggtctgctttggttggtcgtctactcatggcatctattctatcgggctatctggtagttgtttggtgttttgttgttgatagtgtagcacacgagtccggggttgccggtggcgcctgtcctgtgtcggtaccagactgattctccttccatggatgggcattggatgaatgtgcgttgtccttgctcggagatttcgaggtggtgcctgtgtccggccatgagaatgtgggatacggtgccgttgtggaattcttggccgcgccaccattcgtagagttggttgttgcgccattggtgtcagtgggcgtgcaggatggtagccccggctacgttgacggtggtggtcatttcgtcgcgttgggggaaataaaagtggaggttggggtagttgttggtgagttggtaggcttctgcgatggcgcggcagcagtccacgtcgaatgaatcatcgtaggtggtgacgcctttgccgaatcgtacggcttctccgtggttgccggggatggaggtgaccgtaaggttggtgcagtggtcgaacatgtggatgagttgcatcatggccatgcgggtgagccggatttgttccgtcaagggggtttgtgtgcgccaggcgttgttgcctccttgtgacacgtatccttcgatcatgtcgccgaggaaggctatgtggactcgttgcggctggcctgcttgctgccagtagtgtttggcggctgtgagtgagtgcaaatagtcgtcggcgaatcggctggtttctccgccggggatgcctttgccgatttggaagtctcctgccccgatgacgaaggccgcggtgctgtagtcggtgcgggtgtcctgttcgggttttgggggtgcccattcggctagtttatcgacgagttcgtctacagggtaggggtcggttgcgggttggtgggcgatgattttttgtatggatcggcctgtttctccgttgggtagggtccattcggagatgcgtgtgcggcgtacggttccgttggcgagatcatcgcggatggtgtctgcttcgttgtcgtggttggctagctgggtgaggagccggtctatgttgtctatcatcgggtattctcttccttttgtggagtggtgttggcttgtttgcggcggtagtctttgatgacggtggcggagatggggtatccggcttgggtgagttgttttgctagccaggatgcgggtatagacctgtcggcgaggacgtttgcggctttgcggccgtagcgttggatcaacgtttcagttttggttgccatggtgtcctatcggttgtgtggtgggctgccatcctgtgcggcagtctccgtcgtgtcctggtttgcgtgtgtacgatgtgatggtgccgtctgtgtggtggagtgttttgccgcacatgacgttttgtagatgctccggcagctcgctattgctatcgtcttgctcatctagcaaagttttttgttgggtgaaaaactcggacacggtgccgttgtggactgggagtatccatgttttccattgttgttgtagtcgggtgttccagtggaattgtttggcggcgtcttctgcctgttttatggttttgtagtagccgacgagtatgcgctggtgttgctggtcgggcgggttttggcctcgccagtattgtgccgcgacggcgtaccggttgttgtcggtgaaggtgttccggcagtattggatgatgttgttgagggtgtcatctggcagatcatctgggttgaggttggtggcctgggtgaggatgtctcggatggtttgaaggttgcgttttgtgggtttgaacgagatgctcacgatagtgccggctgttcgtcttgcatgaactggttgaaggtgttgttcccggcgtgttgggcttgtgtgatttgctggtcggtccagtcggggtgttgctgtttcagatagtgccagtggcacgcattgtaggtctcgtcttgtagccgtgtgagatggttttcggtgatgatttgtttccacatggcccatgacacgtcgagccggttgaggatttcgagggctgggatgttnaactggtcgaggaagaggatttcgtgggtgtagtagtttttctcgtaggcgtcccatccgcttcggtgcctgttgggctggtttttggggtaggcttcccggcatactttgtgtaaacgcttggccatgtcgtcgggtagtttaatgtcggggttggcgcggatcatggatcgcatcccatcataggtggtgccccaggtgtgcatgatgtaggtggggtcttcaccatcagcccatttttctgcacagacggcgaggcggatacgcctcctgactgtttggctggtgttgcgccggttggggatggggcacgtgtcggggggatccatgatgttttagtttacctttctggtttcgtgttgttgacgtgttttactgtagcacagtgtctagtgcttgtgtcaaccctgtttttccggcctgcaggtaggtgtctgtgacatccccgacagtgaggggcacatgtacggcttgggggagtgctgcctggatggtttgtgccatctggtggcctgcggggtctgggtcggaccagatgtagatgtggtcatagccttcaaaaaatttggtccaaaaagtttgccacgaggttgcgccgggtagggcaacggccgaccatccgcattgttcgaggatcatggagtcgaattcgccttcgcaaatgtgcatttcggatgccgggttggccatggcggccatgttgtagatggggcctgtgtctcctgccggggttaggtatttggggtggttgtgggttttgcagtcgtgcgggagtgagcagcggaaacgcattttcttatttctgctgggccgccccaaacgggatacatgtatgggatggtgatgcactggttgtagttttcgtggccgggtatggggtcattgtcgatgtatccaaggtggtggtagcgggctgtttcttcgctgatgcctcttgctgagagcaggtcgagtatgttttcgaggtgggtttcgtagagggccggggctttctggattcggcggcgttccgcaatgttgtatgggtgtatgctgtcgtacattcgggtttctttcttcgagttgttgttgtagtttggcgagtccgcctccgacaccgcatgtgtggcagtaccagacgcccttgtcgaggttgatgctcatggagggctggtggtcgtcgtggaacgggcagaggatgtgttgctcgttcttggatgggttgtaccgtatccggtaggtgtcgaggaggcggcaggtgtcagaggtgtgggaggagctcgttgagggttgataccacattggcttccctccatggcttgttgcgctgtttcatcactactagtccgatggtggattgtggctgccggtttcggtgtgtttcgtagtttcgtgcctcttggctggcttgtttcacgaattcggcgagatggggctgcccggctttcgcttcgataacgtaggttttgtttccggtttgaaggatgaggtctccttcgtcttcgcggccgttgaggtggaggcgttctatgtcgtgtccggtgtcgcgtagctggtgcaataatcgtgtttcccattctgcgcctgccccgcggttgcgtgcctgctgtgaagccatcatagtcctttgtgtgttgtggtcatgttccatggctgtttttcgacgaggggtccgaagaatgtgtattcggggtaggctcgtagccgctcgtatcgggttccgtcaggaccggatttgccggtgcgctgtttgagtacggcgatgcgtgcctctgccggtatcgtgaggccgttgccattatcctcgccaccatacaatgagactccgaggatgagttgtggtttttctgagagtccgtttttgatttctcgccgtgctggcgggtgttcgatgtcggagccggttttgtcggttgcatggtgtgtgacgatgatggtggagccagtatccctacctaatgctgtgatccattgcatggcttcttgctgggcctggtagtcggattcgcagtcttgaatgtccatcaggttgtcgataacaatgagtggtgggaaagtgttccacatttccatgtaggcttgcagttccatggtgatgtctgtccatgtgatgggtgactggaatgagaatgtgatgtgttggccgtggtggatgctgtctcgatagtattctggcccgtagtcgtcgatgttttgttgtatctgtgtggtggtgtgttgggtgttgagtgagatgattcgtgtggaggcctcccagggtgtcatgtcccctgatatgtagagggcgggctggttgagcatggcggtgatgaacatggctagcccggatttttggctgccggaccgccccgcgatcatgacgagatcccctttgtggatgtgcatgtccaggttgcggtagaggggttctagttgtggtatgcggggcagctcggcggctgtttgggaggctctctcgaaggatcgttgtagagagagcatcggagccttaatctatctgtctatcggttggatgatgttttggtggtcagatggagtcgatgtcgatatcagcatctgtaggggctgtggtgtcgtctagctggccgttatcgcgcttgtctacgtattcggcaaccttatcgtagatggcgtcgtctaatggtttgagcacgaccgcgttgaacccgtttttggtgcgtacggtggcgagtttgaaggcctgttcttctccaaggtaggcttcgaggtcgcggatcatggagtgtgggcggtcgttgttgccgcgcgctttctcaataatagcgttggggatggtttctggggtgccgttgttgagatcgtctagggtgtggaagattgtgacatcagcgtagatgc

SEQ ID NO: 15 - DNA, 12408 bp, unidentified
  source 1..12408: mol_type = unassigned DNA
gggggggttcctggcctggggggccctgtcggtattgtgatcggcttgtttgctgccatgtttgccactaacgcccagttccgtgccgcggtgatgcagcttgtgggtgtggttggtcaagccctggggcagattatggcggctattcagccgctgtttggtttggttgcggggctggtggcccggttggcgccagtgtttgcccagattattggtttggttgccggtttggctgcccagttgatgcctgtgattggtatgctggttgcccggctggtgcctgtgatcacgcagattattggtgcggtgacgcaggtagctgccatgttgttgcctgcgcttatgccggtgttgtaggctgttgtggctgtgatacgtcaggttgttggcgtggttatgcagttggtgccggtgttgatgccggtgattcaacagattttgggtgctgtcatgtctgtgctgccaccggttattggcctgatccggtcgctgataccagtcatcatgtctgttatgcgtgtggtggtgcaggttgttgcggttgtgatacaggtggtggcccgtattcttgcggttgtggctccgatggtggctgctgtggtggggtttgttgcccgtattgttggtgctgttgtgtcggctgtggcccgtgttattgctgctgttgcccgtgttgttgggtgggttgtggcccattttgtgtctggtttggcgcgtatgggttcggtggttcaggctggctggaatcgtattagggcgtttacgtctgcgtttatgagcgggtttaagtcgatcatttctgccggtgtgggcgctgttgtcgggttttttgcgcggcttggtttgtcggttgcttcccatgttcggtctgggtttggcgcggctcgtggtgctgtttcggctgcgatgaatgggatccggagtattgtgtcttcggtggcgtctgctgttggcgggtttttcagttcgatggcgtctagggttcgtagtggtgctgtgcgcgggtttaatggtgcccggagtgcggcatcttctgctatgcatgctatgaggtccgctgtttccaatggtgtgcatggtgtgctagggtttttccggaatctgcccggtaatattaggcgcgctctcggtaatatggggtccctgttggtgtctgcgggccgtgaagtggtttctggtatgggtaatggtatccggaatgctatgagtggcctgttggatacggtgcgtaatatgggttctcaggttgctaatgcggcgaagtcggtgttgggtattcattccccgtcgagggtgtttcgtgaccaggttggccggcaggttgttgccggtttggctgaggggatcaccgggaatgccggtttggctttggatgcgatgtcgggtgtggcgggtcggctgcctgatgcggttgatgcccggtttggtgtgcgatcgtcggtgggctcgtttaccccgtatggcaggtatcagcgtatgagcgagaagagtgttgtggtgaatgtgaatgggcctacttatggggatcctaacgagtttgcgaagcggattgagcggcagcagcgtgacgctttgaatgcgttggcttacgtgtgattgcggggtgtggttcatgtttattcctaacccgtctgatcgtgccggtttgacggtggattggacgatgtttccgtcgattggtaataatccggagcgtgttcttcatttgacggattatacgggtgcgtctcctgtcatgttgttgaatgattcgttgcgcggtttgggtgttcccgaggtggagcatttttctcaaactcatgttggggtgcacggctcggagtggcgcgggtttaatgtgaagcctcgcgaggtgacattacctgtgttggtgtcgggtgttgacccggatccggtgggcgggtttcgtgacggttttttgaaagcctatgacgagttgtggtctgcttttcctccgggcgagcagggggagttgtcggtgaagactcctgccggtgttgagcgtgtgttgaagtgcaggtttgattcggctgatgacacgtttacggtggatctggtgaatcgtggctatgcgcgttatgtgcttcatttgacagcttatgacccgttttggtatggggatgagcaaaagtttcgttttagtaacgcgaagttgcaggattggctgggtggcggtcctgtcggcaagaagggtacagcgtttcctgtggtgttgacgcctggtgtgggctctggttgggataatctgtctaataagggtgatgtgcctgcgtggcctgtgattcgtgttgaggggcctttggagtcgtggtctgtgcagattgatggtttgcgtgtgtcttcggactatcctgtcgaggagtatgattggatcactattgatacggatcctcgcaaacagtctgcattgttgaacgggtttgaggatgtgatggatcgtttgaaggagtgngagtttgccccgattccgcctggcggttctaagagtgtgaatattgagatggttggtttgggtgccattgttgtgtcggtgcagtacaggtttttgagggcttggtgaatagttgatggctggtcttgttccgcatgtaacattgtttacgccggattatcgtcgtgtggcgcctatcaatttttttgagtcgttgaaattgtcgttgaagtggaatggtttgtcgacgctggagttggttgtgtcgggggatcattcaaggcttgaagggttgacgaagccgggtgcacggctggttgttgattatggtgatggccagattttttctgagcctgtgcgtaaggtgcacggtgtgggtccttggcgttcttcgcgggtgactatcacgtgtgaggatgatatccgcctgttgtggcgtatgctgatgtggcctgtgaattatcgtcccggtttggtgggttcggagtggcgtgccgacagggattatgcccactattctggtgctgcggagtcggtggctaagcaggtgttgggggataatgcttggcgttttccgcctggtttgtttatgaccgatgatgagcgtcgtggccgctatattaaggattttcaggtgcggtttcacgtgtttgccgataaactgttgccggtgttgtcgtgggctcggatgactgtcacggtgaaacagtttgagaatgcgaagtttgatcagcgtggtttgctgtttgattgtgtgcctgcggtgacccggaagcatgtgttgactgccgagtcgggttcgattgtgtcgtgggagtatgtgcgtgacgccccgaaggcgacatctgtggttgtgggtggccgcggcgagggtaaggataggctgttttgtgaggatgttgatagcttgtctgagggggagtggtttgatcgtgtcgaggtgtttaaggatgcccgtaacacggattccgagaaggtgcatcttattgatgaggctgagcaggtgttgtccgagtctggggccacgtcggggtttaagatcgagttggctgagtcggatgtgttgcggtttgggcccggcaatctgatgccaggggatttgatctatgtggatgtgggctcgggtcctattgcggagattgttcggcagattgatgtggagtgtgtatcgcctggtgatggttggacgaaggtgactcctgtggcgggggattatgaggataatccgtcggcgttgctagcacggcgtgttgctggtttggctgcgggtgtgcgggatttgcaaaaattctaaaaagattaggggtttgttgtgggtattgtgtgtaaagggtttgatggtgtgttgaccgagtatgattgggctcaagtgtctggtctgatgggtaatatgccgtctgtgaagggcccggacgattttcgtgtcggcacgacggttcagggtgccacagtgttgtgtagtgttttgccggggcaggcgtgggctcacggggtgatgtgcacgtcgaatagtgttgagacggtgacggggcagcttccgggtccgggtgagacccgatacgactatgttgtcctgtctcgggattgggagcagaacacagccaagttggagattgttcccggtggccgtgcggagcgtgcccgtgacgtgttgcgtgccgagcctggcgtgtatcatcagcagttgctagcgactttggtggtgtcgtctaacgggttgcagcagcagttggataggcgagctgtggcggctagggttgcgtttggggagtctgctgcgtgtgatcctacccctgtggagggtgaccgtgtgatggttccttctggggctgtgtgggctaaccatgccggcgagtggatgctactgtctccgaggattgagacgggcactaagcagatccagtttggtagttcgaatgtgtatgcttacacgatcccgtttgatcgcccgtttagtagtccgccggttgtggtggcgtctatggccacggctgctgggggcacgcagcagatcgatgtgaaagcctacaatgtgactgcccaaaattttggtttggcgtttattacgaatgatggttcgaagccgaatggtgtgcctgcggtggctaactggattgctgtcggcgtgtgaccgggctgttgttgaggcggatgttgtgatattggggggctgtggtgtcgtggtttactcctgcactggtggcctctatctgtaccgcattggccacggttttgggttcggttcaggctgccacatctaaatctcggaagcgtttgcggcggctgtcggctcaggtagatgcgatggaagagtatacgtggggtgtgcgccgtgaggtgcgaaggtttaacgccgggcttcctgatgatgtggagccgatgcatctccctgatgtgcccgagtttttgaaagatactgttgatggtggaggtgagtagggttgagggagttggaggaagagaagcggcagcgccgcaattttgagaaggcttcactggtgttgttgtttttgtcgcttgtactgttggcggtggttgccgggggtgctttacgtttcggggctgtatcctctgagcgggattcggagcaggctaaagcccagtctaatggtacagccgctaaagggttggctgcccgtgtgcggcaggtgtgtgcttctggcgggcaggagtcggtgcgtcttcaccggtctggcttgtgtgtggatgctcagcgtgttgagcgtagcgtgcagggtgtgccgggtcctgccggtgagcgcggcccgcaagggcctgcaggtgctgatgggcgtgatggtgttaatggttcggctgggctggttggccctgttggtccgcagggttctcctggtttgaatggtgtgaaaggtcctgacgggttgcctggtgtgaatggatcggatggccatgatggtgttccgggccgtgcaggtgctgatggtgtgaacggtgttgacggttgggatggttcggccggtgagcgcggtgatgtgggcccttcaggtcctgccggcccgcaaggtgcacagggtgaacggggtgagcgcggccccgccggtgcgaacggatccgatggtaaagatggtaaggatggccgttctgttgtgtctgtgtactgttccgggggccgcctgtttgtgaaatatagtgacggtgtggcgtccacgatatcgggttcggtggcctgcgagagtgtgaaaccatcacctgtggttaccgtgtcatccccgcaagtgagagaggaagggtgttactgatgttggtagtgtttggtggtggtgtgtggtgaggtttattcctgcggcgcatcactcggctggttctaatagtccggtgaatagggttgtgattcatgcgacgtgcccggatgtgggttttccgtctgcctcgcgtaaagggcgggcggtgtcgacggcgaactatttcgcgtccccatcgtctggtggttcggcgcattatgtttgcgatattggggagacggtgcagtgcttgtcggagtctacgattgggtggcatgccccgccgaatccgcatagtttaggtatcgagatttgcgcggatgggggttcgcacgcctcgtttagggtgccggggcacgcttacactcgggagcagtggcttgatcctcgcgtgtggcctgcggtggagaaggctgtcatgctgtgtagacgtttgtgtgacaaatataatgttccgaaaaggaaactgtcggctgccgatttgaaggctggcaggcgtggtgtttgcgggcatgtggatgtgacggatgcgtggcatcagtcggatcatgacgatccggggccgtggtttccgtgggacaggtttatggccgtcgtgaacggcggcagtggagagagtgaggagttaacggtggctgatgtgaaagccttgcatgatcagattaaacaattgtctgcccagcttactggttcggtgaaaaagctgcatcacgatgttggtgtggttcaggtacagaatggtgatttgggtaaacgtgttgatgccctgtcgtgggtgaagaatccggtgacggggaagctgtggcgcaccaaggatgctttgtggagtgtctggtattacgtgctggagtgtcgtagccgtattgacaggcttgagtcgactgtcaacggtttgaaaaagtggtggtggtttgttgtgggtaaacagttttggttgggcttgtttgagcgtgcactgaaaacttttattcaaacgtttgttgctgtgttgggtgtgacggcgggtgtcacgtatactgcggagtcgtttcgcggtttgccgtgggaatctgccttgataacagcaacggtggctgcggtgttgtcggttgctacctcgtttggtaacccgtcgtttgttgccggtaaaccgaaaacgacgcctgttgtggatgctgggcttgttccaccggatgatcctggaatagtggagtctcacatggttgacgaaacggatcctggcatgatagagcctatcgacgatgccgatgctggaggctatgtgccgaggcgtgctgctgagtcggaagttggcacggtagagtctactgttgcataagtgaatatagatgtgtgccccagcggtgctgccacggttgtgtggtggctgctgctggggcactctttttgtgtctataggggttttacaggttgttgtctagtgtgtcttcgatgagctggtccaggtggaggcaggctgagatagtatcgttggcctggtctagaacatcctggccgataacgcctttgtggttgtcgcggtggtagaggatggactgcatgatatcgtcggcctccgcttgcagtagttttgcctggtatgcgtttctggcgagccagtctagtgcttcctggcttgcataggggttctggtcctcgctgttgtcacgggtgttgccgttgtttgtggggtgtcctgcactgtcgcagtcccacaggatttcgctgcactcgtctagcgtgtcctggtcgatgtcgagatcgtcgaggctgacttctttgacggtgaggttcacatcatcgagggagatgggtacatggtactggttttcgataccggcaacaatgttttccaactgttgcatgttggtgggttgttgttggatgattcggtgtactgctgtttttagggcagtgtaggggatattggttgtgttgttcatggttttatcccatccctgtgctgtcgtcgttgccgtctggatagtatttactgtttgcgtatcctgtgagggtgatgagtgtttggtctgcccactgtttcacggtttgtcttgtcacacccaatcgttgggcggccgacgcatatgtttggtcatacccgtatacttcccggaatgctgccaaccgtgccaaatgttttcgctgtatggatggctggcaggtgagggtgtagtcgtcgatggctagctgcaaatcgatcatggagacgatgttgttgccgtggtgttgggggggggttggtggtggtggcattcctggttcgacggagggtttccatgggcctccgttccagatccattgggcggcttggatgatgtcggcggtggtgtaggttcggttcactggtcacccctggaataggttgtcgaggttgtctgggttgctggtgttggtggtgtcgaatcgtccgacgcagtggcagtagtcgtacatgagtttgatgatgtgttggtggtctcccaaataggtgtttccgctgatgctgtaggtggctgtgccgtctttgctgatggtgtatttggtggtgatggtttcgggtgtttcggtgttggtgatgatggctgtggtggtggagcctacggtttgtagcctggtggtttgggtgccgtcgtcgaggatggttgtgaccattgtggttctccttagttgctggtttggttgtcggctatggctgtgatttcttggacgggtttgggtaggtctaggtggtggattgttttgtttgctagtcgttgggcgacacggtagcacatttgggtccactggttgcctgtgagttggtggtattggttgcgtaccgcaatatatagtagagagtcttggtacaggtcgtcggggttgacggccgggtagtggcgagcaatgttggtgcaagctttgtgtagctggtgttggtggtggtgggttgcccacccccagttggcggtggtggcttgttggactttggttggtcgtctactcatggtttttatctggctatctggtagttgtttggtgttttatggttgatagtgtggcacacgagtcaggggttgccggtggtgcctgtcttgtgccggtaccagacggattctccttccatggatgggcattgtatgaatgtgcgttgtccttgctcggatatttcgaggtggtgcctgtgtccggccatgaggatgtgggatgtggtgccgttgtggaattcttggccgcgccaccattcgtactgtttgccggttttccattggtgcccgtgggcgtgcaggatttgtgtgccggccacatcaacggtggtggtcatttcgtcccggctggggaagtggaagtgaaggttgggatattggttgttgagctggtaggcttctgcgatggcccggcagcagtccacgtcgaatgaatcatcgtaggtggtgacgcctttgccgaatcgtacggcttctccgtggttgccggggatggatgtgatggtcacgttttggcagtggtcgaattggtggatgagttgcatcatggccatgcgggtgagcctgatttgttccgtcaggggtgtttgtgtgcgccaggcgttgttgcctccttgtgacacgtatccttcgatcatgtcgcctaggaatgcgatgtggactcgttgcggtttaccggcttgttgccagtagtgttttgcggctgtgaggaagtgtaggtagtcgtcggcgaagtgtgctgtttccccgccggggatgcctttgccgatttggaagtctcccgccccgatgacgaaggccgcagtgccgtagtcggtgtgggtgtcctgttcgggttttggtggctgccattcggctagtttatcgacgagttcgtctacagggtaggggttggttgctggttggtggtcgatgattttttgtatggatcggcctgtttctccgttgggtagggtccattcggagatgcgtgtgcggcgtacggttccgttggcgagatcatcgcggatggtgtctgcttcgttgtcgtggttggctagctgggtgaggagccggtctatgttgtctatcatcgggtatcctcttccttttgtggagtggtgttggcttgtttgcggcggtagtctttgatgacggtggcggagatggggtatcctgcctgggtgagcattcgggctagctgtgtggcggggacggttttatcggcgagcacgtcggcggctttgttgccgtagcgttggatgagggtttcagttttggttgccatgatgtcctaggggttgtgtggttggttgccatcctgtgcggcagtcgccgtcgtgtcctggtttgcgtgtgcaccatgttgtggtgccgtctgtgtggtggagtgttttgccgcacatgacttcttggagatgctgtggtagctgctccgggttgttatcgttttgtgtgtcgaagagtgttttttgtttggtgaaatgttcggagacggttccgttgtgtacgggtagtatccatgttttccattgttgttgtagtcgggtgttccagtggaattgtttggcggcgttttctgcctgttttatggttttgtagtagccgacgagtatgcgctggtgttgctggtcgggcgggttttggcctcgccagtattgtgccgcgacggcgtaccggttgctggctgtgaaggcgtcccagcagtattcgataatgtgctggagcacattatcgggcatgtctcgtacttggttttcgtcgagccactcgtcgacaataatgttgcgtatggcttgcttgtctttggtggtggatttgaacgagatgctcacgatagtaccggctggtcgtcttgcatgaactggttgaaggtgttgttccaggcgtgttgggcttgtgtgatttgctggtcggtccagtcggggtgttgctgtttcagataataccagtggcacgcattgtaggtttcgttttgtagccgtgtgagatggttttcttcgatgatttgtttccacatggtccatgacacgtcgagccggttgaggatttcgagggctgggatgttgaactggtcgaggaacaggatttcgtgggtgtagtagtttttctcgtaggcgtcccatccgctttggtgcctgttgggctggtttttggggtaggcttcccggcagattttgtgtaaacgcttggccatgtcgtcgggtagtttaatgtcggggttggcgcggatcatggatcgcatcccatcataggtggtgccccaggtgtgcatgatatgcagtgggtcttcaccgtctgcccatttttctgcacagatggcgaggcggatacgcctcctgactgtttggctggtgttgcgccggttggggatggggcacgtgtcgaggggatccatgatgttttagtttacctttcttgtttcgtgttgttgacgtgttttactgtagcacagtgtctagtgcttgtgtcaaccctgtttttccggccngcntgtaggtgtctgtgaaggcaccgatagtgaggggcacatgggnggnttgnngtnncncggtttggngggtttgggncatcttgtctcccgctttgtctgggtctgaccagatgtagatccggtcgtagccttcgaagaatttggtccagaaggtttgccacgaggttgcgccgggtagggcgacggccgaccatccgcattgttcgaggatcatggagtcgaattcgccttcgcagatgtgtatttcggctgccgggttggccatggcggccatgttgtagatggagcctgtgtctccggccggggtcaaatatttggggtgattatgtcccttgcaatcatgctggagtgagcagcgaaaccggattttgcgtacctcggctgggccgtcccatgtggggtacatgtaggggatggtgatgcactggttgtagttttcgtggcctgggatggggtcattgtcgatgtatccaaggtggtggttgcgggctgtttcttcgctgatgcctcttgctgagagcaggtcgagtatgttttcgaggtgggtttcgtagagggccgaggctttctggattcggcggcgttccgcaatgttgtatgggcgtatactgtcgtacattcgggttttcttcttctaatcgttgttgtagcttggcaagtccgcctccgacaccgcatgtgtggcagtaccagacgcccttgtcgaggttgatgctcatggagggctggtggtcgtcgtggaacgggcagaggatgtgttgctcgttcttggatgggttgtaccgcatccggtaggtgtcgaggaggcggcaggtgtcagaggtgtgggaggagctcgttgagggttgattccacataggcttcgctccatggcttgttgcgctgtttcatcactacgagtccgatggtggaattgttttctcggtttcggtgggtttcgtagttgcgtgcctcccggctggcttgtttcacgaattcggcaaggtgtgcctgtcctgctttggcttcgatcacataggttttgtggctggttgtgaggatgaggtcgccttcatcctctttaccgttgaggtggaggcgttctatatcatggccggtgtcgcgtagttggtggaggagtcgtgtttcccattcggctccggcccggcggttgcgtgcctgttgtgttgacatgatagtcctttgtggtgttcggtcatgttccatggctgtttttcggcgagtggcccgaaggatgtgtattcggggtaggctctgagtctttcgtatcgggttccgtctgggctggatttgcctgtgcgctgtttgagtacagcgatgcgtgcctcagcggggatg

SEQ ID NO: 16 - DNA, 9543 bp, unidentified
  source 1..9543: mol_type = unassigned DNA
ggcttaagtggcatctgtcacacccgacactccagcatgaaacgctcaatccggttgagcgcagccttgactcccggttgcaacctacacactctagaaaccacaacaaccaacccaaacagttcagaagggagcacactcgtggatggcacactcgtcacaccatccttcaccagcctctacgggcccacagacatcaacccactccaccccgcacacctggcaggatgtgacataggcaacacccacacgtctatcatctgccgcctgcaccgtgccaaagtcgaggaagccatccgactcatccggcccctgtggactgtcaccctcgacggagccgtatacgggccacccgactggcagtcactcaccgaaaacgaagccgaagagttgcacgacatgatcgacatgatcgacgtggacgccatcatcgccgaagccacacacaacgagcctagaatcgcctagaaatactcgacctatatagttgtacccccaagggctgaaagtcgctctaatcctcagagtacaagcttaaaacacgaaagaaggaccaatcatgcaatggacatgccacaagtgcgatagcacaatcatcggataccgaccagagcactgcacagtctgccacgagacatttaatggcactcatgccggggacatgcaccggacaggcgatcacggggtcaaggaaggccccagtcgccgcaggtgcctcactgtggacgagatggaggctaagggatggctcgtagccgccatggatactggacgcaaggtagtgacatgtcacgcttaaatgacaaaaccccaagccacacaggaaacgctcacacaaactgagcgacaccttgacagtggtagtacagtctggaaatattaaccatgtcagcaacgaacaacaccccagaaaggggaacacagccatgaacaagaaaaaaggctacaccatcgccggaatcacagctgccatcatcgccgcatgctcatttatgccagccccagacgacaatccgccactcgcctcacagccagccccacaggccaccacagccaacaccgaatggacccccaagactacccaacagcgcaaagccgagaaagcggcacggcaggcagccgccacccgctccatacaagccgagcaggccaaagcccacaagcaagcccaagcaaggggggaagaaaccgccaccggactcaccatgatcacggcagcacacacctgcaaccgcaaagccgaacaacaggccgccgcacacggtgtcaactggaacggcaaccccgacatcgacctccaactccacaaaaccatcggtaaagacacattcagcatcgtctacggcgcaaccgcgaaacagcccggcgcatccaaactacccgtcaccgtccactgcctcgtcaccggaacagaagaccaccagcacgtcaccgacctcaacatcaacccgcaacagtaacccgccaaggagcatccccgctatgcctctcctctcccactacgctgtcaccaccggactcgccgacacggcacacattattcaccacaccggcggcacactacgcacagccaccgatattgcctcccgcatcaacaccctcaacccagacattgatctcgaccacgaaatccgacaactgttatctatcgaaaccgacctgtacaacatttataaaaccatcaacaccattcttcaggagcaagcatgaacacacccaacaacaacattgagctacacagctacgaaacgttcttcaccagcctcgcctggatccaaggcggcatcatcacatggatgtacgcaaccggcaccccacacaaggcagccctcgccatcatcgccgcatgcgccctcgccaccctcctgggtgcctcaaccctcaccaacaatccccgagacaccaaatgatcacaacacccatcctcatcgctgaaaccctcgccatcattattctcgccgtagcactagcccacaacaacaaccagtaacccacacttaaggagcacacaccccatggatgagcccacccgcatgtacaccgaccccaacaccggagcccgaagagaattaaaactctgcaggctctcactcatcgaccccgcagccttgcacgccctaggcgaagtagccggatacggtgctactaaatacggcgacaacaactggaccggcggctatccgtggagccacagcattgacgccctctacaggcacctgctatcatggcagcaaggaaacaacctcgattatgaatccgggctaccccacctggcacacgcagcctggcactgcctcgcactcctcgcataccagcaacacaatgccggccgagacacccgcaacccatggaacaaaagcgacaagtaatgcctctagcacaataccagaaaaccatcagccatccaggccacatctcctacagttcactcacccagtgggccgaatgtggagaaaaatggcgcctatcccacggctaccacacccaacaccacacctggtacgccaccatcgccggaagcgccatacaccacatcaccgaacaatacgacctacacctgtacaaccccaccgaatactctgcactaccagacaaactctcatccttcaaaaacattttcgacacccaagtcgccctcgccgaatccgaaggcacagaaatcaaaccctccggcagaatatgcaaaaacatgtgcgagtcgggcgggccacacaagaaagactacgactggtggatggtttacggccccacctttgtggaccgctggaaaacatggaggcgcaaccacccaggatacatcaccgcaatcctggacggtaaaccaggcatcgaatacccggtagaaaccatcctcgacgatgacacaaaaatagtcggctacatcgaccgcgttttcaccgacaccgacaccggcgaaaccttcatcctcgacctcaaaaccggacgcctacccgccgacagtatgcagctgcacacataccgatacatgctcaaccaacacggcaacgatgtgacaaaaggcatgttttgggcgccagccaccggctgcaacgacgacaagtccccaacacaaggcacatccaccgaactctacgaccttgacaacaacacctaccggcatgtatcatccatgtacagtcaagcaatgaaaggaatcagcgaaggcatcttcgtcccacacgtcacaacactctgtaaaggctgccccgtcaaggacgcctgctgggctgtcaacgggaaagacgcctacaggtaccctatagaaaccaccatcacagccccaacaaaagaagacaaggagcaccagtgaccgacaacacagacgacgaccgattcaccgtcacactcaaatacggaggcgactacgccgccccatggaccgtcatccgcggagacaccgccgaccaggtaaagaaggctatcatcgacctgctaggcggactcaaaaacagctccgcggcaaggaactgggacctggcaacactgatcgccacagcatccatcatcctccaagaccgatacaaccaggccgccaaagactacgtagacaacatcgcctcagaaggaaacaacaccatcatcgacaaaatcaacaatgcaacaagcaaagcacagctagccgacctcctcaaacagtacaaaaagatcatcaccagtaacagggacgtgtctgaggctttccgcagcaaacgcaacagcctcacccgataaaaaccgacacaaaccaacaaaaccaaacataaacagtaaaaggaaaacagttatgggactcgccaactaccgaaacaacagcaacagcaccttcttcaacccctcccgaaaccaggacgccaccgccatcgccttcaaaatccacgacgtccagcacaacaccgaaggctacggcggacagaccgcagaccgcatctacgccgatgtcacaatcttccacaccctagacgatctcaacaacggcaccccagaaaccatccccaacgccattatcgagaaagcgcgcggcaacaacgaccgcccacactccatgatccgcgatctagaagcctatcttggcgaggagcaggccttcaaactcgccaccgtacgcaccaaaaacggcttcaacgcggtaatcctcaaaccccttgatgacgccatctacgataaggttgccgaatacgtagacaagcgcgataacggccagctagacgacaccacagcctcaactgatgctgatatcgatatcgactccatctgaccaccaatacacatccaaccgatagatagataaggtcccgatgctctctctccaacgatccttcgagagagcctcccaaaccgcagccgagctgccccgcataccccagctagaacccctctaccgcaaccaggacatgcacatccacaaaggggatttggtcatgatcgcggggcggtccggcagccaaaaatcagggctagccatgttcatcacagcgatgctcaaccagccagccctctacatatcaggggacatgacaccctgggaggcctccacacgaatcatctcactcaacacccaacacaccaccacacagatacaacaaaacatcgacgactacgggccagaatactatcgagacagtatccaccacggccaacacatcacattctcattccagtcacccatcacatggacagacatcaccatggaattgcaagcctacatggaaatgtggaacaccttcccaccactcattgttatcgacaacctgatggacatccaagactgcgagagtgactatcaggcacngcaagaagcnatgcaatgnannacnncatnagncagggatactggctccaccatcatcgtcacccaccacgcaacnganaaaaccggaaccgacatagaacacccgccagctagacgggaaatcaaaaatggcctctccgaaaaaccacaactcatcctcggggtctcattgtatggtggcgaggataatggcaacggcctcacgataccggcagaggcacgcatcgccgtactcaaacagcgcaccggcaaatccggtcctgacggaacccgatacgaacgactcagagcctatcctgaatacacattcttcgggcccctcgccgaaaaacagccctggaacatgaccacaacacacaaaggactatcatgtcgacacaacagtcacgcaaccgccgggccggcgcagaatgggaaacacgactcctccaccagctccgtcacatcggccatgatatagaacgcctccacctcaacggtaaagaggacgaaggcgacctcatcctcaccaccagccacaaaacctatgtgatagaagccaaagcaggacagcagcatctagcccaattcgtcaaacaagccagccgagaagcacgcaactacgaaacacaccgaaacaaacaaaacaattccaccatcggactcgtagtgatgaaacagcgcaacaaaccatggagcgaagcctatgtggtatcaaccctcaacgagctcctcccacacctctgacacctgccgcctcctcgacacctaccggatacggtacaacccatccaagaacgagcaacacatcctctgcccgttccacgacgaccaccagccctccatgagcatcaacctcgacaagggcgtctggtactgccacacatgcggtgtcggaggcggacttgccaagctacaacaacgattagaagaagaaaacccgaatgtacgacagtatacgcccatacaacattgcggaacgccgccgaatccagaaagcctcggccctctacgaaacccacctcgaaaacatactcgacctgctctcagcaagaggcatcagcgaagaaacagcccgctaccaccaccttggatacatcgacaatgaccccatcccaggccacgaaaactacaaccagtgcatcaccatcccatacatgtaccccgtctgggggcggccagccgaaatacgaaaaatgcgtttccgctgctcactcccgcacgactgcaaaacccacaaccaccccaaatatttaacccccgccggggacacaggctccatctacaacatggccgccatggccaacccggcagccgaaatgcgcatttgcgaaggcgaattcgactccatgatcctcgaacaatgcggatggtcggccgtagccctacccggggccacctcgtggcaaactttctggaccaaattcttcgaaggctacgaccgcatctacatctggtccgaccccgacaaagcaggcgaccagatggcccaaaccctccaaaccgcactcccccaagccatccacgtgcccctcactgtcggagatgtcacagacacctacctgcaggccggcaaaacagggttgacacaagccctcaacacagtgctacaataaaaccagacaaacaacccaaaccaagaaaggcatataaagcatcatggatcccctcgacacctgccccatccccggccgccgcgacacctccaaggccgccaggagacgcatccgcctcgccatctgtgcagaaaaatgggccgacggcgtggacccactccacatcatgcacacctggggcaccacctatgatgggatgcgatccatgatccgcgccaaccccgacatcaaactacccgacgacatggccaaacgtttacacaaaagctgccgggatgcctaccccaaaaaccagcccaacaggcaccgaagcggatgggacgcctacgagaaaaactactacacccacgaaatcctcttcctcgaccagtttaacatccagccctcgaaatcctcaaccggctcgacgtgtcatggaccatgtggaaacaaatcatcgaagaaaaccatctcacatggctacaaaacgaaacctacaatgcgtgccactggtattatctgaaacagcaacaccccgactgcaccgaccagcaaatcacacaagcccaacacgccgggaacaacaccttcaaccagttcatgcaagacgaacagccggcactatcgtgagcatctcgttcaaacccacaaaacgcaaccttcaaaccatccgagacatcctcacccaggccaccaacctcaacccagatgatctgccagatgacaccctcaacaacatcatccaatactgctggaacaccttcactgacaacaaccggtacgccgtcgcggcacaatactggcgaggccaaaacccgcccgaccagcaacaccagcgcatactcgtcggctactacaaaaccataaaacaggcagaaaacgccgccaaacaattccactggaacacccgactacaacaacaatggaaaacatggatactacccgtacacaacggaaccgtctccgaacatttcaccaaacaaaaaacactcttcgacacacaaaacgataacaacccggagcagctaccacagcatctccaagaagtcatgtgccgcaaaacactccaccacacagacggcaccacaacatggtgcacacgcaaaccaggacacgacggcgactgccgcacaggatggcagcccaccacacaacccctaggacatcatggcaaccaaaactgaaacgttgatccaacgctacggccgcaaagccgcaaacgtcctcgccgacaggtctatacccgcatcctggctagcaaaacaactcacccaagccggataccccatctccgccaccgtcatcaaagactaccgccgcaaacaagccaacaccactccacaaaaggaagaggatacccgatgatagacaacatagaccggctcctcacccagctagccaaccacgacaacgccatcgacactatcgacgacattctcgccaatggtactgtacgccgcacacgcatctccgaatggaccttaccgaacggagaaacaggccgatcaatccaaaaaattattgaccaccaacccccatcagacccctaccctatagactaactcgtcgataaactagccgaatggacacccccaaaaccagccgacaacactcgcaccgactacagcactgcagccttcgtcatcggggcgggagacttccaagtcggcaaaggcatccccggaggagaaacatcacacttcgccgacgactatttgcactccctcaccgccgcaaaacactactggcaacaggcaggcaaacccgaacgagtccacatcgccttcctcggcgacatgatcgaaggatacgtgtcacaaggaggcaacaacgcctggcgcacacaaacccccttgacggaacaaatccggctcacacgcatggacatgatgcaactcatccacatgttcgaccactgcaccaaccttacggtcacctccatccccggcaaccacggagaagccgtacgattcggcaaaggcgtcaccaccaacgatgattcaatcgacgtcgactgctgccgcgccatcgcagatgcctaccaactcaccaacaactaccccaacctccacatttatttcccccaacgcgacgaaatgaccaccaccgtcaacgtagccggggctaccatcctgcacgcccacggacaccaatggcgcaacaaccgacactacgaatggtggcgcggccaagaattccacaacggcaccgtatcccacattctcatggccggacacaggcaccacctcgaaatatccgagcaaggacaacgcacattcatacaatgcccatccatggaaggagaatccgcctggtaccggcacaagacaggcaccaccggcaaccccggactcgtgtgctacactatcaaccataaaacaccaaacaactaccagatagccagataaaaaccatgagtagacgaccaaccaaagcagacctagccaccaccgcatcgtggggatgggcaaccccccaccaccagcgccagctacacaaagcctgcaccaacacggcacgccactaccccgcaatcagcgtagacgacctctaccaagactccctactatatattgcggtgcgggaacaataccacaacctagacaacaaacactacaccaaaatgtgctacagggtagccaaacggctagccaacaaaaccatacaacacctagaccagccgaaacctttacccgatatcattcatctagccgacaaccaaaccagcaactaaggagaatcataatggtcaccaccatcctcgacgacggcacccaaaccaccaggctacaaacagtaggcgccaccaccaccgccatcatcaccaacacagaaacccccgaaaccatcaccgccaaatacaccatcagtaaagacggcacagccacctacagcatcagcggaaacacctatttgggagaccaccaacacattatcaaactcatgtacgactactgccactgcgtcggacgattcgacgccaccagccagccagacaacctcgacaacctgttccaggggtgacacatgacccgaacctacaccaccgccgacatcacccaagccgcccaatggatctggaacggaggcccatggaaaccctccgtcgaaccaggaatgccaccaccaccaaccgccccccaacaccacggcaacaacatcgtctccatgatcgatttgcagctagccatcgacgactac

SEQ ID NO: 17 - DNA, 10856 bp, unidentified
  source 1..10856: mol_type = unassigned DNA
gtcttaaacttcaatataataacctttaaatcttaaagcttataggtataataatataatataactatataagtattaaagcttataagttataaaagttttagaagagctaagaggttaacttctttacttctcttctctctttggttctttctctcttctcttcttttcttcatcaggggagaagaggaacctttaccatcagcgccgatgacctttgccgtgtgtctcgtgtaccaccggtcgcacgctcccggtttgcacactccccacactctgacacccgtgtccctttcaggcttagcgtgttcggctgaaggcgtacggcgtgtcacgcttaaacccttaacaccaggtaagacttaaagtgtatattataagtagaagactttaaaaccttaaggtgttcccgcttagcctgtgtcctttaacgccaggcgtcaagcactaagctgtgaaacgcgaacacccatccacccccatttttctttcgtgtccttctctttttgacacagctggggggcgatgtgatctttctcacaggccagggggtagtggagaaaacaaacaccccctcaaacgaacaaaacagcccccagaatcgaatgacagggcaagggcaaggtattcatacccccagacgattccaggccgttacaagagcaaacaagacccgtacagggctaggcgaggatcggggacgtgatggcacacaccaaccgcaccgcatcatccgcacaccgacgctggcggcaacgactcatcacccaagcccgacagcaaggccaaaccgaatgcccactctgcggagcccagatagcctggggcacacacgacctaccaaccagccccgaagccgaccacatcacacccgtcagcctcgggggactcaaccccctcgacaacgggcaaatcatctgcagaacatgcaacagaagcaaaggcaatcgcagtgatccaaacattagtttccaacaacaaaccacaaaaacgttgattccatggtgaaaaacccgccaacccccaccggggacaccccctgcacacccgtgcaaaacctcgtacggcttagtgaaatacctcccttttgtggatttgcctgtttgtcgactttttgtgttggtggtgagtgttgtgcagcctgagcttcctgatagtcgtgagtggtgaggggagacgcgtcgttggtggtgtgtgtggggtgaggatagtcgcgcgcagtacgtgtctgatgaggagtggctgtttctcatggatgctgcggtgattcatgatgtggtgtggcgtgagggtcgcgctgatttggtggcttcgcttcgtgctcatgcgaaggcgtttatgggcatgttggatcgttattcggttgatgtggtgtctggtggccgtggtgggggttctgcggtggcgatgattgaccggtatcggaagcgtaaaggggcctaatgtcgagcgttgttggttctcaggttcctcgtcaccgggtggctgcggcgtattcggtgtctgctggcggtgatgcttgggagttgggtcgtgcgtatgggttgacgcctgatccgtggcagcagcaggtgttggatgattggctggctgtcggtagcaatggcaggcttgcttcgggtgtgtgtggggtgtttgtgcctcgccagaatggcaagaatgctattttggaggttgtggagttgtttaaggcgactattcagggtcgccgtattttgcatacggctcacgagttgaagtcggctcgtaaggcgtttatgcggttgaggtcgttttttgagaatgagcggcagtttcctgacttgtatcgtatggtgaagtcgattcgtgcaacgaatggccaggaggctattgtgttgcatcatccggattgtgccacgtttgagcgtaagtgtggttgcccgggttggggttcggtggagtttgtggctcgtagccgtggttctgctcgcgggtttacggttgatgatttggtgtgtgatgaggcgcaggagttgtcggatgagcagttggaggcgttgcttcctaccgtgagcgctgccccgtctggtgatccgcagcagatttttttgggtacgcctcctgggccgttggctgacggtagcgtggtgttgcgtcttcgtgggcaggctttgtcgggtggtaaaaggtttgcgtggacggagttttcgattcctgacgagtctgatccggatgatgtgtcgcggcagtggcggaagttggcgggggatacgaatccggcgttgggtcgccgcctgaatttcgggaccgtgtcggatgagcatgagtcgatgtctgctgccgggtttgctcgggagcggcttggctggtgggatcgtggccagtctgctgcgtctgtgattccggcggataagtggtcccagtctgcggtggatgaggctagtttggttggcggcaaggtgtttggtgtctcgttttctcgttcgggggatcgtgtcgcgttggcgggtgctggtcggactgatgctggggttcatgttgaggtgattgatgggctgtcggggacgattgttgatggtgtgggccggttggctgattggttggcggttcgttggggtgatactgaccggatcatggttgccgggtctggtgcggtgttgttgcagaaggcgttgacggatcgtggtgttccgggccgtggcgtggtggttgccgatactggggtgtatgtggaggcgtgtcaggcgtttttggagggtgtcaggtcgggtgtgatcagtcatcctcgtgctgattctcgccgtgacatgttggatattgctgtgaggtcggctgtgcagaagaagaaaggctctgcgtggggttggggttcctcgtttaaggatggttctgaggttcctttggaggctgtgtctttggcgtttatgggggctaaacaggctaggcgtggccgtcgtgatcgtggtggtaggaagcgggtgtctgtggtatgaactcggatgagttggcttggattgagggcatgtttgatcggattcaaaggttgtcttcgtggcattgccgtattgagggctactatgagggttcgaatcgggtgcgtgatttgggggtggccattcctccggagttgcagcgtgtgcagactgtggtgtcgtggcctggtatagccgtggatgctttggaggagcgtctggattggcttggctggactaacggtgacggctacggcctggatggtgtgtatgcggcgaatcggcttgctacggcgtcgtgtgatgtgcatttggatgcgctgatttttgggttgtcgtttgtggctgttattccccaaggcgatgggtcggtgttggttcgtccgcagtcacccaagaactgtacaggccggttttcggctgacgggtctcgtctggatgctggccttgtggtgcagcagacgtgtgatcctgaggttgttgaggcggagttgttgttgcctgatgtgtttgttcaggtggagcggcgaggtagccgtgagtgggttgaggtggatcgtataccgaatgtgcttggggcggttccgttggtgccgattgtgaatcggcgtaggacgtcgcgtattgatgggcgttcggagattacgaggtctattagggcttacacggatggggctgttcgcacactgttggggcagtctgtgaatcgtgacttctatgcgtatcctcagcgttgggtgacgggtgtttcggctgacgagttttcgcagcctggctgggtgttgtctatggcttctgtgtgggctgtggataaggatgatgatggggacactccgaatgtggggtcgtttccggttaattctccgactccgtattcggatcagatgcgcttgttggcgcagttgactgcgggtgaggctgctgttcaggagcgctatttcgggtttattacgtctaatccgccttcgggtgaggctttggctgctgaggagtcgcggcttgtgaagcgggctgagcggcgtcagacgtcgtttggtcagggctggctgtcggttggtttcctggctgccaagtcgcttgattcttccgttaacgaagctgatttttttggtgatgttggtttgcggtggcgtgatgcatcaacacctactcgggcggctacagcggacgctgtgacgaagcttgttggtgccggtattcttcctgcggattctcggacggtgttggagatgttgggtttggatgatgtgcaggttgaggctgtgatgcgtcatcgtgccgaatcttcggatccgttggctgcgcttgctggggctatatcgcgtcagacgaacgaggtttgataggcgatggcttcgggggttgaggcgaggcttgctgctgccgggtatcagcgtgaggcgattcgttttgccgggaagtatgcgggctattatgctgagcttggtcgtttgtggcattccgggaagatgacagatgcgcagtatgtgcgtttgtgtgtggagttggagcgtgccggccatgatggttcggcatcgttggctgccaggtttgtgtcggattttcgccggttgaatggtgtggatcctggtttgattgtgtatgactagtttgatgctgcggcggctttggctaggtcgttttcgactatgaagactcttgagagtgacccggatagggtgaatgatacgattgatgtgatggctgcgggtgttgatcgggctgttatgaatgctgaccgtgacacggttgagtggtctgctggtgcgcagggtaggtcgtggcgtcgggtgacggatggtgatccgtgtgctttttgtgccatgttggctacgaggtcggattatacgactaaggaaagggcgctcacgactggtcatactcggcgtcataagcgtggcggtaagcgtccgctgggttcgaggtatcatgatcattgtgggtgtacggtggttgaggttgttgggcgttgggagccctcctctgcggacaccgcatatcagcgggtttatgagaaggctcgtgagtgggttgatgatcatgggttgcagcagtcgcctggcaatattttgaaggctatgcgtactgttggcgacatgagatgatggtttccggttgtgtgccgccggttatcggtgcgcagggttgtctcccgcacgggggtcaacaatgttgtgttgttttccgcaaggagtgtaggttaggctatggccgatcagagtgttgaggaacagaatgttgacaatgatgctgtggagcccggaaagggtgacggcattgttgacacggtgaagggcgatcaaggcaaacaggttgaagatcagtcgaagagtgaaggcgagggtaaatcgtctgggactgattggaaggcggaggcccgtaagtgggagtctcgtgctaaaagtaatttcgccgagttggagaagcttcgcgcctcggatggtgatgcggggtctgtgattgatgatcttcgccgcaagaatgaggaactcgaagaccggatcaatgggtttgttcttgagggtgtgaagcgtgctgttgcggccgagtgtggcttgtcgggtgatgcggtcgctttcttgcacggtagcgaccgtgaagcgctggtggagtctgctaaggctttgaagggtttgatcgaccatagtagtggtggcgcgggtgtgcgccggcttgcggggagtgcccccgttgatgatgttaaacgacgtgagggtgtcgcgtttgtggatgctcttgtcaataattctaggagatgatttgtgatggctgacgattttctttctgcagggaagcttgagcttcctggttctatgattggtgcggttcgtgaccgtgctatcgattctggcgttttggcgaagctttcgccggagcagccgactatttttggccctgttaagggtgccgtgttttcgggtgttcctcgcgccaagattgttggtgagggtgaggttaagccttccgctagtgttgatgtttcggcgtttactgcgcagcctattaaggttgtgactcagcagcgtgtctcggacgagtttatgtgggctgatgctgattaccgtctgggtgtgcttcaggatctgatttccccggctcttggtgcttcgattggtcgcgctgtggatctgattgctttccacggtattgatcctgccactggggagcctgctgcggctgtcaaggtgtcgctggataagacgaagaagacggttgatgccacggattctgctacgaccgatcttgttaaggctgtcggtcttatcgctggggccggtttgcagattcctaacggtgttgctttggatccggcgttctcgtttgccctgtctactgaggtgtatccgaaggggtctccgcttgccggccagcctatgtatcctgcagctgggtttgctggtttggataattggcgcggctttaatgttggtgcttcttcgactgtttcgggtgccccggagatgtcgcctgcctctggtgttaaggcgattgttggtgatttctctcgtgttcattggggtttccagcgtaacttcccgatcgagctcatcgagtatggtgacccggatcagactgggcgtgacctgaagggccataatgaggttatggttcgtgccgaggctgtgctgtatgttgcgattgagtcgcttgattcgtttgccgtggtgaaggagaaggctgccccgaagcctaatcctccggctggtaactgattcatttgttgcgataatgtttatgctgtgtgcagggggtggtgttgatgggtatcatttggaagcctgaggatattgagcctttcgccgatattcctagagagaagcttgaggcgatgatcgccgatgtggaggctgtggctatcagtgtcgccccctgtatcgctaaaccggatttcaaatacaaggatgccgctaaggctattctgcgcagggctttgttgcgctggaatgatactggcgtgtcgggcaggtgcagtatgagtctgcgggtcctttcgctcagactacacggtctaatactcccacgaatttgttgtggccttctgagattgctgcgttgaagaagttgtgtgagggtgatggtggggctggtaaagcgttcactattacaccgaccatgaggagtagtgtgaatcactctgaggtgtgttccacggtgtggggtgagggttgctcgtgcgggtcgaatattaacggctacgctggccctttgtgggagatatgatatgaccagttttccttatggtgaaacggttgtgatgattcaaccgactgttcgtgtcgatgatcttggcgacaaggttgaagactggtctaagcctgtcgagactgtgtaccataatgtggccatctatgcttccgtttcgcaggaggatgaggcggcaggccgtgactcggattatgagcattggtcgatgcttttcaagtcccctgttgtgggcgctgattatcgttgccggtggcgtattcggggtgttgtgtgagaggctgacgggtctcctatcgtgtggcatcatccaatgtctggctgggatgcgggcacgcagatcaatgtgaagcgtaagaagggctgatcggttgtggctcaggatgtgaatgtgaagctgaacttgtcgggtattcgtgaggtgttgaagtctcctggtgtgcagggcatgttggctgagcgtggcgagcgggttaggcgtgccgcatcggcgaatgtgggcggtaatgcttacgatagggcccagtatcgtgccgggttatcatcggaggtgcaggttcaccgtgttgaggctgtcgctcgtataggcaccacatataagggtgggaagcgtattgaggcgaagcatggcacgttggcgaggtcgattggggctgcgtcgtgatcgtttacggtgatccgcgtgtgtgggctaaacgcgtgctcaaggatgatggctggctgtctgggataccgtgtacagggacggtgcctgaggatttcagcggtgacctggtctggttggcgttggatggtggtccgcagttgcatgttcgtgagcaggtgtttttgcgggtgaacgtgttttcggatactccggatagggctatgtctttgtcgcgtcgtgttgaggctgtccttgttgacggggttgatggtggcccggtggtgtactgcaaacggtctactggccctgatttgctggttgatggtgcacgttttgatgtgtattcgctttttgagctgatatgcaggcctgtcgaatctgagtaaacgtatttgtttttgttttaatgtaattgtttgatatttaatgggggttgtgatggctgcaacacgtaaagcgtccaatgttcgctctgctgttactggcgacgtttatattggtgacgcgcacgccggtgacactattgatggtgttgggaagattcctgacggtcttaccgctttagggtatctgtcggatgatgggtttaagattaagccggagcgtaaaacggatgatttgaaggcgtggcagaatgcggatgttgttcgcactgttgccaccgagtcgtctatcgagaattctttccagctgatcgagtctaagaaggaggttatcgagctgttttggcagtcgaaggttactgccggagccgattcgggttcgttcgatatttctcctggcgccaccaccggggttcatgccctgttgatggatattgttgatggcgatcaggttattcgctactatttccctgaggttgagctcattgatcgtgacgagattaagggtaagaatggcgaagtgtacgggtatggtgtgacgttgagggcgtatcctgcccagattaatcataagggtgatgcggtgtcggttcgggggtggatgacggctttaaaagctgatactcctccgacgcctcctccttcgccgaagccggatcctaatccgccgtctgagaactgatacacgattttagggattgttgatagatgagtgacactggttacacgttgaagattggtgaccgtagctgggtgttggcggatgcggaggagacggctcaggctgttcctgcccgcgtgttccgtcgtgccgccaggattgcccagtcgggggagtctgcggatttcgcccaggttgaggtgatgttttctatgttggaggctgccgccccggctgacgcggtggaggccctggaggggcttcctatggttcgtgttgccgagattttccgtcaatggatggaatacaagcctgatggtaagggtgcctcgctgggggaatagtttggctccacggcctgattgatgattatcgtggggccatcgaatacgattttcgcactaaatttggtgtttctgtttatagtgttggtggcccgcagatgtgttggggtgaggctgtccggctggctggcgtgttgtgtaccgatacgtcgagccagttggcggcccacctgaatggttggcagcgcccgtttgagtggtgcgagtgggctgtgctggacatgctggatcattacaggtctgctaatagtgaggggcagccggagcctgtggcgaggcctacggatgaacgtagggcccggtttacgtctgggcaggtggacgatattttggcgcgtgttcgtgccggtggcggggtgtctcgcgagattaatattatggggtgaatagtgtatgtctggtgagattgcttccgcatatgtgtcgttgtatacgaagatgccgggtttgaagtctgatgttggtaaacagttgtcgggtgtgatgcctgctgagggtcagcgttcgggtagcctgtttgctaagggtatgaagttggctttgggtggcgccgcaatggtgggtgccatcaacgtggctaagaagggtctcaagtctatctatgatgtgactattggtggcggtattgctagggcgatggctattgatgaggctcaggctaaactgactggtttgggtcacacgtcgtctgccacgtcgtcgattatgaattcggctattgaggctgtgacgggtacgtcgtatgcgttgggtgatgcggcttctactgcggcggcgttgtctgcttcgggtgtgaagtctggcgggcagatgacggatgtgttgaagactgtcgcggatgtgtcttatatttcgggtaagtcgtttcaggatacgggcgctatttttacgtctgttatggctcgcggtaagttgcagggcgatgacatgttgcagcttactatggcgggtgttcctgtgctgtctttgcttgccaggcagactggtaaaacgtctgctgaggtgtcgcagatggtgtcgaaggggcagattgattttgccacgtttgcggctgcgatgaagcttggcatgggtggtgctgcgcaggcgtctggtcagacgtttgagggcgctatgaagaatgttaagggcgccctgggttatcttggtgccacggctatggcgccgtttcttaacgggttgcggcagatttttgttgcgttgaatccggttattaagtctgttacggattctgtgaagccgatgtttgcgtcggtggatcaggggattcagcgggtgatgccgtctattttggcgtggattaaccgtatgccgggcatgatcacgagaatgaatgcacagatgcgcgccaaggtggagcagctgaagggcatttttgcgagaatgcatttgcctgtccctaaagtgaatttgggtgccatgtttgcgggtggcacggctgtgtttggtattgttgctgcgggggttgggaagcttgttgcagggtttgccccgctggcggtgtcgttgaagaatctgttgccgtcgtttggtgcgttgaagggtgccgccggggggcttggcggcgtgtttcgtgccctggggggccctgtcggtattgtgatcggctcgtttgcggccatgtttgccacttacgcccagtttcgcgcccgggtaatgctgcttgtggctgtgggtggccaggct

SEQ ID NO: 18 - DNA, 8925 bp, unidentified
  source 1..8925: mol_type = unassigned DNA
gcacagctcgccgaccttctgaaacagtacaagaagatcatcaccagtaacagggacgtgtctgaggctttccgcaccaaacgcaacagcctcacccgataaaaaccgacacaaaccaacaaaaccaaacataaacagtaaaaggaaaacagttatgggactcgcaaactaccgcaacaacagcaacagcaccttcttcaacccctcccgaaaccaggacgccaccgccatcgccttcaaaatccgcgacgtgcagcacaacactgaaggctacggcggacaggtcgcagaccgcatctacgctgatgtcacaatcttccacaccctagacgatctcaacaacagcaccccagaaaccatccccaacgccattattgagaaagcgcgcggcaacaacgaccggccacactccatgatccgcgaactcgaaacctacctgggagaagagcaggccttcaaactagccactgtgcgcaccaaaaacgggttcaacgccgttattctcaaaccattggacgacgccatctacgataaggttgccgaatacgtagacaagcgcgataatggccagatagacgacaccacagcctctactgacatcgatatcgactccatctgaccaccactctccgcccaaaccgtaacagatagataaggttccgatgctctctctccaacgatccttcgagagagcctcccaaaccgcagccgagctgccccgcataccacaactagaacccctctaccgcaacctggacatgcacatccacaaaggggatctcatcatgattgcggggcgctccggcagccaaaaatccgggctagccatgttcatcacagcgatgctcaaccagcccgccctctacatatcaggggacatgacaccctgggaggcctccacacgaatcatctcactcaacacccaacacaccaccacacagatacaacaaaacatcgacgactacgggccagaatactatcgagacagcatccaccacggccaacgcatcacattctcattccagtcacccatcacatggacagacatcaccatgggattgcaagcctacatggaaatgtggaacaccttcccaccactcattgttatcgacaacctgatggacattcaagactgcgaatccgactaccaggcacagcaagaagccatgcaatggatcacagcagtgggcagggatactggctccaccattattgtcacacaccatgcaaccgacaaaaccggctccgacatcgaacacccgccagcacggcgagaaatcaaaaacggactctcagaaaaaccacaactcatcctcggagtctcattgtatggtggcgaggataatggcaacggcctatcgataccggcagaggcacgcatcgcagtgctaaaacagcgcaccggcaaatccagccccgacggcacccgatacgagcggctacgagcctaccccgaatacacattcttcgggccactcgccgaaaaacatccctggaacatgaccacaacacacaaaggactatgatggcgacacagcaggcacgcaaccggcgggccggagccgaatgggaaacacgattattgcaccagctacgcgacaccggacacaatatcgaacgcctccaccccaacggtaaagaggatgagggcgacctcatcctcacaaccggcaacaaaacctacattatcgaggcgaaagccgggcaaccacacctagcccaattcgtcaaagaagcaacccttgaggcacgcaactacgaaacacaccgaaacaaacaaaacaattccaccatcggactcgtagtaatgaaacagcgcaacaagccatggagggaagcctatgtggtatcaaccctcaacgagctcctctcacacctctgacacctgccgcctcctcgacacctaccggatacggtacaacccgtccaggaacgagcaacacatcctctgcccgctccacgacgatcaccagccctccatgagcatcaacctcgacaagggcgtctggtactgccacacatgcggtgtcggaggcggacttgccaagctacaacaacgattagaagaagaaaacccgaatgtacgacagtatacgcccatacaacattgcggaacgccgccgaatccagaaagcctcggccctctacgaaacccacctcgaagacatactcgacctgctctcagcaagaggcatcagcgaagaaacagcccgctaccaccaccttggatacatcgacaatgaccccataccaggccacgaaaactacaaccagtgcatcaccatcccatacatgtacccctttttgggcggcccagccgaaatacgaaaaatgcgtttccgctgctcactcccgcacgactgcaaaacccacaaccaccccaaatatttgaccccagccggggacacaggctccatctacaacatggccgccatggccaacccggcatccgaaatgcacatttgcgaaggcgaattcgactccatgatcctcgaacaatgcggatggtcggccgttgccctacccggcgcaacctcgtggcaaactttttggaccaaattttttgaaggctatgaccacatctacatatggtccgacccagacccggcaggcgaccagatggcccaaaccctccagtcagcactcccccaagccacccatgtgcccctcaccctgggggatgtcacagacacctaccttcaggccggaaaaacagggttgacacaagcactagacactgtgctacagtaaaacacgtcaacaacacgaaaccagaaaggtaaactaaaacatcatggatccgctcgacacgtgccccatccccaaccggcgcaagaccagccaaacagtcaggaggcgtatccgcctcgccatctgtgcagaaaaatgggctgatggtgaagaccccacctacatcatgcacacctggggcaccacctatgatgggatgcgatccatgatccgcgccaaccccgatattaaaccacccgacgacatggcagaacgtttgcacaaagtatgccgggaaacctaccccaaaaaccagcccaacaggcaccgaagcggatgggacgcttacgagaaaaactactacacccacgaaatcctcttcctgaaccaatttaacatcccagccctcgaaatcctcgaccggctagacgtgtcatggacaatgtggaaacaaatcatcaccgaaaaccatctcacccggctacaagacgaaacatacaatgcgtgccactggcactatctgaaacagcaacacccagactggaccgaccaacaaatcacacaagcccaacacgccgggaacaacaccttcaaccagttcatgcaagacgaacagccggcactatcgtgagcatctcgttcaaacccacaaaacgcaaccttcaaaccatccgagacatcctcacccaggccaccaacctcaaccctgacgatctgcctgacgacaccctcaacaacatcatccaatactgctggaacaccttcaccgacaacaaccggtacgccgtcgcggcacaatactggcgaggccaaaacccacccgacagtgaacatcagcgcatactagtcggctactacaaaaccgctaaacaagccatgaacgcggccaaacaattccactggaacacccggctacaacaacaatggaaaacatggatactcccagtccacaacggcaccgtatcagagcatttcaccaaccagaaaacactcttcgacacaccaaccagcaaccagggtgacgccgcactgccggagcatctacaaaacgtcatgtgcggcaaaacactcaaccacacagacggaaccgtatcgtggtgcacacgcaaaccaggtcacgacggcgactgccgcacaggatggcaacccaccacacaaccgataggacaccatggcaaccaaaactgaaacactcatccaacgctacggtaacaaggctgccgacgtgctcgccgacaaaaccatccccgcctcatggctagcaaaacagctcacccaggcaggataccccatctcccccactgttattaaagactatcgccacaaacaagccaacaccaccccgcaagaggagaatatccgatgatagacaatattgaccggctactcacccagctagccaaccacgacaacgccatcgacaccatcgacgacaatctcgccaatggtactgtacgccgcacacgcatctccgaatggacactccccaacggagaaacaggccgatccgtacaaaaaatcatcgaccaccaacccgcaacaaacccctaccctgtagacgaactcgtcgataaactagccgaatggccaccccccaaacagtccgacacccgtagcagcgatgcggccttcgtcatcggggcaggcgacttccaaatcggcaaaggcatccccggaggggaaacagcacacttcgccgacgactacctacactccctcgcctcagctaaacactactggcagcaagcaggccagccgcaacgagtccacatagccttcctcggcgacatgatcgaaggatacgtgtcacaaggaggcaacaacgcctggcgcacacaaacacccttgacggaacaaatcaggctcacccgtatggccatgatgcaactcatccacatgttcgaccactgcgccaacgtcaccatcacatccatccccggcaaccacggtgaagccgtgcgcttcggtaaaggcgtcaccacctacgacgactccttcgatgtggactgctgccgggccatcgcagaagcccaccagctcaacaaccaataccccaaccttcacttccacttccccagccgagacgaaatgaccaccaccgttgatgtggccggtacacaaatcctgcacgcccacggacaccaatggcgcaacaaccaacactacgaatggtggcgcggccaagaattccacaacggcaccgtatcccacattctcatggccggacacaggcaccacctcgaaatatccgagcaaggacaacgcacattcatacaatgcccatccatggaaggagaatccgtctggtaccggcacaagacaggcaccaccggcaaccccggactcgtgtgctacacaatcaaccataaaacaccaaacaactaccagatagccagataaaaaccatgagtagacgaccaaccaaagtccaacaagccaccaccgccaactgggggtgggcaacccaccaccaccaacaccagctacacaaagcttgcaccaacattgcccgccactacccggccgtcaaccccgacgacctgtaccaagactctctactatatattgcggtacgcaaccaataccaccaactcacaggcaaccagtggacccaaatgtgctaccgtgtcgcccaacgactagcaaacaaaacagtccaccacctagacctacccaaacccgtccaagaaatcacagccatagccgacaaccaaaccagcaactaaggagaaccacaatggtcacaaccatcctcgacgacggcacccaaaccaccaggctacaaaccgtaggctccaccaccacagccatcatcaccaacaccgaaacacccgaaaccatcaccaccaaatacaccatcagcaaagacggcacagccacctacagtatcagcggcaacacctatttgggagaccaccaacacatcatcaaactcatgtacgactactgccactgcgtcggacgcttcgacaccaccaacaccaacagcccagacaacctcgacaacctgttcagggggtgacacatgaaccacacctacaccaccgcagatattattcaagcagcccaatggatctggaacggcggcccatggaaaccctcagtagaacccggcatgccacccccaccaaccgccccccaacaccacggcaacaacatcgtctccatgatcgatttgcagctagccatcgacgactacaccctcacctgccagccatccaaacagcgaaaacatttggcacggttggcagcattccgggaagtctacgggtatgaccaaacatatgcgtcggccgcccaacgattgggtgtgacaagacaaaccgtgaaacagtgggcagaccaaacactcatcaccctcacaggatacgcaaacagtaaatactatccagacggcaacgacgacagcacagggatgggataaaaccatgaacaacacaaccaatatcccctacactgccctcaaaacagcggtacaccgaatcatccaacaacagcccaccaacatgcaacaactagaaaacattgttgacggtgtcgaaaaccagtaccgtgtacccatctccctcgatgatgtgaacctcaccgtcaaagaagtcagcctcgacgatctcgacatcgaccaggacacgctagacgagtgcagcgaaatcctgtgggactgcgacagtgcaggacaccccacaaacaacagcaacacccatggcatgccagacgacacacaggcaagccatgaagccatagactggctcgccagaatcgcataccaggcaaaactactgcaagcggaggccgacgatatcatgcagtccatcctctaccaccgcgacaaccacaaaggcgttatcggccaggatgttctgcaccaggccaacgaaactatctctacctgcctccacctgtatcagatgctcgaagacaccatcgacagcaacgaatcatagccacaccgcataaacaaaaagagtgccccagcggcaaccaccacacaatcgtggcagcaccgctggggcacacacatattcaattatgcaacagtagactctaccgtgccaacctccgactcggcggcacgcctcggctcatagccaccaaaatcagcatcatccttcggctcgatcatgcccggatccgacacatccaccgagtgcggctcaaccaagcccccatcgtcgggtggaacaagcccagcatccacaggcgtagttttcggcttaccggccacaaacgacgggctaccaaacgaggtagcaaccgacagcaccgcagccaccgttgctgtaatcagggcagactcccacggcaaaccgcgaaacgactccgcagtatacgtgacacccgccgtcacacccaacacagcaacaaacgtttgaataaaagttttcagtgcacgctcaaacaagcccaaccaaaactgtttacccacaacaaaccaccatcactttttcaaaccgttgacagtcgactcaagcctgtcaatacggctacgacactccagcacgtaataccagacactccacaaagcgtcttttgtgcgccacagcttccccgtcaccggattcttcacccacgacaaagcctccacacggcgcgccaagtcaccattctgaacctgaaccacacccacatcgtgatgcagcttattcaccgactgggccacctgcccagacaactgtttaatctgatcatgtaacgctttcacatcagccaccgttaactcctcactctctccactgccgccattgacgacggccataaacctgtcccacggaaaccacggccccggatcgtcatgatccgactgatgccacgcatccgtcacatccacatgcccgcaaaccccacgcctgccagccttcaaatcggcagccgacagtttccttttcggaacattatatttgtcacacaaacgtctacacagcatggcagccttctccaccgcaggccacacgcgaggatcaagccactgctcccgagtgtaggcgtgccccggcaccctaaacgaggcgtgcgaacccccatccgcgcaaatctcgatacctaaactatgcggattcggcggggcatgccacccaatcgtagactccgacaagcactgcaccgtctccccaatatcgcaaacataatgcgccgaaccaccagacgatggggacgcgaaatagtttgccgtggacaccgcccgccctttacgggaggcagacggaaaccccacatccgggcacgtcgcatgaatcacaaccctgttcaccggactattcgagccggccgagtgatgcgctgcaggaataaacctcaccacacaccaccaccaaacactaccatcacagccactcctttctatttgtgggatgatatagtcactataggcgacggtttcacaccctggcaggccaccgagcccgatattgtagaagccacaccgtcactatatttcacaacaaggcggcccccggaacagtacacagaccccaccgagcgcccatctttaccgtctttaccgtcgaatccgttcacaccagcggggccacgctcaccccgttcaccctgcgcgccttgcgggccggcaggacccgaaggccccacatcgccgcgcccaccgaccgaaccatcccgaccatcagcgccgtcaacgccgttcacaccatcagcacctgcacgacccggaacaccatcacggccatccgacccattcgcgccaggcaacccgtcaggacctttcacaccattcaaaccgggagaaccctgcgaaccaacagggccaaccagccccgccgaaccattaacaccatcccggccgcgtacacctgcagggccttgtgggccgcgtacacctgcagggccaggcacaccctgcacgctacgctcaacacgcacagcatccacacacatgccagactggtgaagacgcaccgactcctgcccacccgaagcacacgcctgccgcacacggtttgccaaccctttagccgctgtaccattagactgggccctcgcctgctccgaatcccgctcagaggatacagccccgaaacgcaaagcacccccggcaaccaccgccaacaacacaagcgacaaaaacagcaacaccagtgaaaacttctcaaaattgcggcgctgccgcttctcctcctccaactccctcaaccctactcacctccaccatcaacagtatctttcaaaaactcgggcacatca

SEQ ID NO: 19 - DNA, 11354 bp, unidentified
  source 1..11354: mol_type = unassigned DNA
cctgcgancacatggatttcgngggcctngccgaagcctaccggcaaancgtggangccgaantccacaagctncgccccaacacgttcatcgccaccgacggcaccgtctacagccatgacgagtggaagccactcaccggtggggaagccacgcaactcttctggaacgtgatccgcatcaatgttggccatctactcaccctgttcgccctataaaacccccaccacacacaatgagtctagaatcgcctagaaatacctgacctatataatcctacctaagagcgctaaaagtctcttgtacgctaaatgcagtagcttaaaacacgaaagaaggaccaatcatgcaatggacatgccacaagtgtgacaccacaatcatcggataccgaccagaacactgcacaatctgccatgaaacatttaatggcactcatgccggggacatgcaccggacaggcgatcacggggtcaaggaaggccccagtcgccgcaggtgcctcactgtggacgagatggaggctaagggatggctcgtaaccgccatggatactggacgcaaggtagtgacatgtcacgcttaagtgacaaaaccccaagccacacaggaaacgctcacacaaactgagcgacaccttgacagtggtagtacagtctggaaatattaaccatgtcagcaacgaacaacaccccagaaaggggaacacagccatgaacaagaaaaaaggctacaccatcgcaggcgccactatcgccattattgccgcatgctctttcctgccagcacccgacgacaacccgccactcgcctcacagtcagccgcacaggccaccacagccaacaccacatggacacctgaaaccgcccagcagcgcaaagccgagaaagcagccaagcaggccgcagcagtccgctccctacaagcagaacaagccaaaacccacaagcaagcccaaacaaggggtgaagaaaccgccaccggactcaccatgctcaccgctgcacacgcctgcaaccgcaaagccgaacaacaggccgcagcacacggtgtcaactggaacggcaaccccgacatcgacctccaactccacaaaaccatcggtaaagacaccttctccatcgtctacggtgcaaccatgaaacagcccggcgcatccaaactcccagtcaccgtacactgcctcgccaccggaacagaagaccacccgcacgtcaccgacctcaacatcaacccgcaacagtaacccgccaaggagcatccccgctatgcctctcctctcccactatgctgtcaccaccggactcgccgacacggcacacattattcaccacaccggcggcacactacgcacagccaccgatattgcatcccgcatcaacgccctcaacccagacattgatctcgaccacgaaatccaccaactgttatctatcgaaaccgacctgtacaacatttataaaaccatcaacaccattcttcaggagcaagcatgaacacccccaacaacaacattgagctacacagctacgaaacgttcttcaccagcctagcctggatccaaggcggcatcatcacatggatgtacgccaccggcaccccacacaaggcagccctcgccatcatcgccgcatgcgccctcaccaccctcctaggcgcatcaacactcaccaacaatccccgagacactaaatgatcacaacacccatcctcatcgctgaaaccctcgccatcattattctcgccgtagcactagcccacaacaacaaccagtaacccgcacttaaggagcacacaccccatggataagccaacccgcatatacaccaaccccgaaaccggcgccaagaaagaactcaaactctgcaggctatccctcatcgaacccgccgccttgcactcgctcggcgaagtagccggatatggtgccaccaaatacggcgacaacaactggaccggcggatacccctggtgtcacagcgtcgacgccctctacaggcacctgctatcatggcagcaaggaaacaacctcgattatgaatccgggctaccccacctggcacacgcagcctggcactgcctcgcactcctcgcataccagcaacacaatgccggggtagacacccgcaacccatggaacacccacaaaggcgaccagtaatgcctctagcacaatacccgaaaaccatccaccatccaggccacatctcctactcatcactgtcacagtgggccgaatgcggagaaaaatggcgcctatcccacggctaccacacccaacaccacacctggtacgccaccatcgccggcagcgccatacaccacatcaccgaacaatacgacctacacctgtacaaccccaccgaatactctgcactaccagacaaactctcatccttcaaaaacattttcgacacccaagtcgccctcgccgaatccgagggcacagaaatcgaaccctccggcagaatatgcaaaaacatgtgtgagtcgggcgggccacacaagaaagactacggctggtggatggtttacggccccacctttgtggaccgctggaaaacatggaggcgcaaccacccagaatacatcaccgcaatcctggacggtaaaccaggcatcgaatacccggtagaaaccatcctgaaagatgacacaaaaatagtcggatatattgacagaatattcaccaacaccgacaccggcgaaaccttcatcctcgacctcaaaaccggacgcctacccgccgacagtatgcagctgcacacataccgatacatgctcaaccaacacggcaacgatgtgacaaaaggcatgttttggacgccagccaccagccgcaacgacgacaagtccccaacacaaggcacatccaccgaactctacgaccttgacaacaacacctaccggcatgtatcatccatgtacagtcaagcaatgaaaggaatcagcgaaggcatcttcgtcccacacgtcacagcactctgcaaaggctgccccgtacaagacgcctgctgggccgtcaacggcaaaaactcgtacagatacccgatagaatcaaccgtacagccaccagaaacagacaataaagaaaagaacaccaaatgaccgataaagacaagatcgacaatgatcgactcacgatcacactcaaatacggtggcgactatgctgccccatgggccgtcatccgcggagacaccgcagaagacatcaaacaatccattattgatctgctaggaggattgaaagacgaaaccgtatccaaagactgggacctcgcaaccctcatcgctagcgcagcaatcccgcttcaagaccgatacgataaagccgccaaagactacgtcaacaagatcgccaacaaggaaaacgacatcatcatcgaccggatcaacaaagccaccagcaaggcacagctcgccgaccttctgaaacagtacaagaagatcatcaccagtaacagggacgtgtctgaggctttccgcagcaaacgcaacagcctcacccgataaaaaccgacacaaaccaacaaaaccaaacataaacagtaaaaggaaaacagttatgggactcgcaaactaccgcaacaacagcaacagcaccttcttcaacccctcccgaaaccaggacgccaccgccatcgccttcaaagtccacgatgtagaacacaacactgaaggctacggtggacaaacagcagaccgcatctacgctgatgtcacaatcttccacaccctaggcgatctcaacaacggcaccccagaaaccatccccaacgctattattgagaaagcgcgcggcaacaacgaccgcccacactccatgatccgcgatctagaagcctatcttggcgaggagcaggccttcaaactcgccaccgtacgcaccaaaaacggcttcaacgcggtaatcctcaaaccccttgatgacgccatctacgataaggttgccgcatacgtagacaagcgtgataacggccagctagacgacaccacagcctcaactgatgctgatatcgacatcgactccatctgaccaccaaaacacaaccaaccaatagatagataaggtcccgatgctctctctccaacgatccttcgagagagcctcccaaaccgcagccgagctgccccgcataccccagctagaacccctctaccgcaaccaggacatgcacatccacaaaggggatctcaccatgattgcggggcgctccggcagccaaaaatccgggctagccatgttcatcacagcgatgctcaaccagcccgccctctacatatcaggggacatgacaccctgggaggcctccacacgaatcatctcactcaacacccaacacaccaccacacagatacaacaaaacatcgacgactacgggccagaatactatcgagacagcatccaccacggccaacacatcacattctcattccagtcacccatcacatggaccgacatcaccacggaattgcaagcctacatggaaatgtggaacaccttcccacccatcattgttatcgacaacctgatggacatccaagactgcgagagtgactatcaggcacagcaagaagccatgcaatggatcacagcattaggtagggatactggctccaccatcatcgtcacccaccacgccaccgacaaaaccggctccgacatcgaacacccgcccgcccggcgagaaatcaaaaacggcctctccgaaaaaccacaactcatcctcggggtctcattgtatggtggcgaggataacggcaacggcctcacgataccggcagaggctcgcatcgcagtgctaaaacagcgcaccggcaaatccagtcctgacggcacccgatatgagcggctcagagcctaccccgaatacacattcttcggccccctggtagaaaaacagccatggaacatgaccacaacacacaaaggactctaaaaaactatggccacacagcaggcacgcaaccggcgggccggagccgaatgggaaacacgactcctccaccagctacgcgacaccggccacgatatagaacgcctccaccccaacggccgcgaagacgaaggcgacctcatcctcacaaccggccacaaaacctatgtgatcgaagccaaagcgggccagccacacctagcccaattcgtgaaacaagccagccgggaggcacgcaactacgaaacccaccgaaaccgcgaaaaccagtccaccatcggactcgtcatcatgaaacagcgcaacaaaccctggagcgaagcctatgtggtatcaaccctcaacgagctcctcccacacctctgacacctgccgcctcctcgaccactaccagatacgctacaacccgtccaaaaacgagcaacacatcctctgcccgctccacgacgaccaccagccctccatgagcatcaacctcgacaagggcgtctggtactgccacacatgcggtatcggaggcggactccacaagctacagcaacgactagagaaagaaaacccgaatgtacgacagcatacgcccctacaacattgcggaacgccaccgaatccagaaagcctcggccctctacgaaacccacctcgaaaacatactcgacctgctctcagcaagaggcatcagcgaagaaacagcccgctaccaccaccttggatacatcgacaatgaccccatacccggccacgaaaactacaaccagtgcatcaccatcccatacatgtaccccgtttggggcggcccagccgaaatacgaaaaatgcgtttccgctgctcactcccgcacgactgcaaaacccacaaccaccccaaatatttgacaccggcaggggacacaggctccatctacaacatggccgccatggccaacccggcatccgaaatgcacatttgcgaaggcgaattcgactccatgatcctcgaacaatgcggatggtcggccgttgccctacccggcgcaacctcgtggcaaactttttggaccaaattttttgaaggctatgaccacatctacatctggtccgacccagacaaggcgggccaccagatggcgcaaaccctaacccaagcattaccgcaagccacccatgtgcccctcaccctgggggatgtcacagacacctacctgcaggccggaaaaacagggttgacacaagcactagacactgtgctacagtaaaacacgtcaacaacacgaaaccagaaaggtacactaaaacatcatggatcccctcgacacgtgcccaatccccaaccggcgcaacaccagccaagctgccaggaggcgcatccgcctcgccatctgagcagaaaaatgggctgatggcgaagaccccacctacatcatgcgcacctggggcaccacctatgatgggatgcgatccatgatccgcgccaaccccgacattaaactacccgacgacatggccaaacggttacacaaaatctgccgggaagcctaccccaaaaaccagcccaacaggcaccgaagcggatgggaccaatacgagaaaaactactacacccacgaaatcctcttcctcgaccagtttaacatcccagccctcgaaatcctcaaccggctcgacgtgtcatggaccatgtggaaacaaatcatcgaagaaaaccatctcacacggctacaaaacgaaacctacgatgcgtgccactggtattatctgaaacagcaacaccccgactggaccgaccagcaaatcacacaagcccaacacgccgggaacaacaccttcaaccagttcatgcaagacgaacagccggcactatcgtgagcatctcgttcaaacccacaaaacgcaaccttcaaaccatccgagacatcctcaaccaggccaccaacctcaacccagatgatctgccagatgacaccctcaacaacatcatccaatactgctggaacaccttcaccgacgacaaccggtacgccgtcgcggcacaatactggcgaggccaaaacccgcccgaccagcaacaccagcgcatactcgtcggctactacaaaaccataaaacaggcagaaaacgccgccaaacaattccactggaacacccgactacaacaacaatggaaaacatggatactacccgtacacaacggaaccgtctccgaacatttcaccaaacaaaaaacactcttcgacacacaaaacgataacaacccggagcagctaccacagcatctccaagaagtcatgtgcggcaaaacactccaccacacagacggcaccacaacatggtgcacacgcaaaccaggacacgacggcgactgccgcacaggatggcagcccaccacacaacccctaggacatcatggcaaccaaaactgaaacgttgatccaacgctacggccgcaaagccgcaaacgtcctcgccgacaggtctatacccgcatcctggctatcaaaacaactcacccaagccggataccccatctccgccagggtcataaaagactaccgccgaaaacaagccaacaccactccacaaaaggaagaggatacccgatgatagacaacatagaccggctcctcacccagctagccaaccacgacaacgaagcagacaccatccgcgatgatctcgccaacggaaccgtacgccgcacacgcatctccgaatggaccctacccaacggagaaacaggccgaaccatacaaaaaatcatcgaccaccaacccgcaaccgacccctaccctgtagacgaactcgtcgataaactagccgaatggacaccccccaaacccgaacaagacacacacaccaactacagcactgcagccttcgtcatcggggcaggagacttccaaatcggcaaaggcatccccggcggagaaacagcacacttcgccgacaactacctacacaccctcatcgtcgcaaaacactactggcaacaagcaggcaaaccgcaacgagtccacatcgcattcctcggcgacatgatcgaaggatacgtgtcacaaggaggcaacaacgcctggcgcacacaaacacccctcaccgaacaaatccggctcacccgcatggccatgatgcaactcgtccacatgtccgaccactgcgccaacgtcaccatcacatccatcccaggcaaccacggtgaagcagtacgattcggtaaaggcgtcaccacctacgacgactccttcgatgtagactgctgccgcgccatcgcagaagcctaccagctcaacaaccaatatcccaacctacacttccacttccccagccgagacgaaatgaccaccaccgttgatgtggccggcacacaaatcctgcacgcccacgggcaccaatggaaaaccggcaaacagtacgaatggtggcgcggccaagaattccacaacggcaccgtatcccacattctcatggccggacacaggcaccacctcgaaatatccgagcaaggacaacgcacattcatacaatgcccatccatggaaggagaatccgtctggtaccggcacaagacaggcaccaccggcaaccccggactcgtgtgctacactatccaccataaaacaccaaacaactaccagatagcccgataaaagagatgccatgagtagacgaccaaccaaagtccaacaagccaccaccgccaactgggggtgggcaacctcccaccaccaacaccagctacacaaagcctgcaccaacattgcgcgccactacccggccgtcaaccccgacgacctgtaccaagactctctactatatattgcggtacgcaaccaataccaccaactcacaggcaaccagtggacccaaatgtgctaccgtgtcgcccaacgactagcaaacaaaacagtccaccacctagacctacccaaacccgtccaagaaatcacagccatagccgacaaccaaaccagcaactaaggagaaccacaatggtcacaaccatcctcgacgacggcacccaaaccaccaggctacaaacagtaggcgccaccaccaccgccatcatcaccaacacagaaacccccgaaaccatcaccgccaaatacaccatcagtaaagacggcacagccacctacagcatcagcggaaacacctatttgggagaccaccaacacattatcaaactcatgtacgactactgccactgtgtgggacgattcgacaccacccgcaccagcaacccagacaacctcgacaacctattcaggggatgacacatgagccgaacctacaccaccgccgacatcatccaagccgcccaatggatctggaacggaggcccatggaaaccctccgtcgaaccaggaatgccaccaccaccaaccgccccccaacaccacggcaacaacatcgtctccatgatcgatttgcagctagccatcgacgactacaacctcacctgccagccatccaaacagcgaaaacatttggcacggttggcagcattccgggaagtctacgggtacgaccaaacatatgcgtcggccgcccagagactcggggtgacaagacagactgtgaaacagtgggcagaccaaacattgatcaccctcacaggatacgcaaacagtcgatactaccaagacgacagcgcagggatggaataaaaccatgaacaacacaaccaatatcctctacactgccctaaaaacagcagtacaccgaatcatccaacaacaacccaccaacatgcaacagttggaaaacattgttgccggtatcgaaaaccagtaccatgtacccatctccctcgatgatgtgagcctcaccgtcaaagaagtcagcctcgacgatctcgacatcgaccaggacacgctagacgagtgcagcgaaatcctgtgggactgcgacagtgcaggacaccccacaaacaacagcaacacccatggcatgccagacgacacacaggcaagccatgaagccatagactggctcgccagaatcgcataccaggcaaaactactgcaagcggaggccgacgatatcatgcagtccatcctctaccaccgcgacaaccacaaaggcgttatcggccaggatgttctagaccaggccaacgatactatctcagcctgcctccacctggaccagctcatcgaagacacactagacaacaacctgtaaaacccctatagacacaaaaagagtgccccagcagcagccaccacacaaccgtggcagcaccgctggggcacacatctatattcacttatgcaacagtagactctaccgtgccaacctcagactcggcagcacgccgaggctcatagccaccaagatcagcatcatctgcaggctcgatcatgccaggatccgacacatccaccgaatgaggctccactattccgggatcatccggtggaaccaaacccgcatccagctgaggcttgccgggcttgccggccacaaacgacgggttaccaaacgatgtagccaccgacaaaaccgcagcaaccgtagctgtgatcagggccgactcccacggcaaaccgcgaaacgactccgccgtataggtgacacccgcagtcacccccaacacagcaacaaacgtttgcacaaaagtcttagccgaccgctccagtaaacctaaccaaaactgtttacccacaacaaaccaccatcactttttcaaaccgttgacagtcgactcaagcctgtcaatacggctacgacactccagcacgtaataccagacactccacaaagcatccttagtgcgccacagctcccccgtcacaggattcttcacccacgacaaagcctcgacacgcttacgcaagtcaccattctgcacctgaaccacaccaacatcgtgatgcagccggttcaccgactgggccacctgcccagacaactgtttaatctgatcatgcaaggctttcacatcagccaccgttaactcctcactacttgaaccgccgccgtggccattcaccacagccataaatttgtcccacggaaaccacggccccggatcatcgtgatccgactgatgccacgcatccgtcacatcagtgtgcccgcagatgccccgcctaccagccttcaaatcggatacgctaagcttccttttcggaacaccatgcttgtcacacaactgccgacacaggatggcagccttctccaccgcaggccacacgcgaggatcaagccactgctcccgagtgtaagcgtgccccggcaccctaaacgaggcgtgcgaacccccatccgcgcaaatctcgatacctaaactatgcggattcggcggggcatgccacccaatcgtagactccgacaagcactgcaccgtctccccaatatcgcaaacataatgcgccgaaccaccaggcgatgggacgcgaaatagtttgccggggacaccgcccgccctttacg

SEQ ID NO: 20 - DNA, 17114 bp, unidentified
  source 1..17114: mol_type = unassigned DNA
aacatctggttgacaaggatgctgttgagtccggaaaggataacggcattgttgatacagtaaaagacgatggcgggcaggaggtagccgacaatcagttgaagaatgaaggcgagggtaaatcgccggggactgattggaaggctgaggcccgtaagagggagtctcgtgctaaaagtaatttcgccgagttggagaagcttcgcgcctcggatggtgatgcggggtctgtgatcgatgatcttcgccgcaagaatgaggaactcgaagaccggatcaatgggtttgttcttgagggtgtgaagcgtgctgttgcggccgagtgtggcttgtcgggtgatgcggtcgctttcttgcacggtagcgaccgtgaagcgctggtggagtctgctaaggctttgaagggtttgatcgaccatagtagtggctgcgcgggtgtgcgccgtcttgcggggagtgcccccgttgatgatgttaaacgacgtgagggtgtcgcgtttgtggatgctcttgtcaataattctaggagatgatttctgatggctgacgattttctttctgcagggaagcttgagcttcctggttctatgattggtgcggttcgtgaccgtgctatcgattctggtgttttggcgaagctttcgccggagcagccgactatttttggccctgttaagggtgccgtgtttagtggtgttcctcgcgcttagattgttggtgagggcgaggttaagccttccgcatcggtggatgtttcggcgtttactgctcagcctatcaaggttgtgactcagcagcgtgtctcggacgagtttatgtgggctgatgctgattactgtctgggtgtgcttcaggatctgatttccccggctcttggtgcttcgattggtcgcgctgttgatctgattgctttccatggtgttgatccggctacgggtaagcctgctgctgctgtcaaggtgtcgcttgataagacgacgaagacggttgatgccacggattctgctacgaccgatcttgttaaggctgtcggcctgattgcgggggctggtttgcaggttcctaacggtgttgctttggatccggcgttctcgtttgccctgtctactgaggtgtatccgaaggggtctccgcttgccggtcagccgatgtatcctaccgccgggtttgctggtttggataattggcgtggcctgaatgttggtgcttcttcgactgtttctggtgcccctgagatgtcgcctgcctctggtgttaaggcgattgttggtgatttctctcgtgttcattggggtttccagcgtaacttcccgatcgagcttatcgagtatggtgacccggatcagactgggcgtgacctgaagggccataatgaggttatggttcgtgccgaggctgtgctgtatgttgcgattgagtcgcttgattcgtttgccgtggtgaaggagaaggctgccccgaagcctaatcctccggctggaaactgattcatttgttgcgataatgtttatgctgtgtgcagggggtggtgttgatgggtatcattttgaagcctgaggatattgagcctttcgccgatattcctagagagaagcttgaggcgatgattgccgatgtggaggctgtagctgtcagtgtcgccccctgtatcgctaaaccggatttcaaatataaggatgccgctaaggctattctgcgcagggccctgttgcgctggaatgataccggggtttcgggtcaggtgcagtatgagtctgcgggtccttttgctcagacgacacggtctaatactcccacgaatttgttgtggccttctgagattgctgcgttgaagaagttgtgtgagggtgatggtggggctggtaaagcgttcactattacaccgaccatgaggagtagtgtgaatcattctgaggtgtgttccacggtgtggggtgagggttgctcgtgcgggtcgaatattaacggctacgctggccctttgtgggagatacgatatgaccagttttccttatggtgaaacggttgtgatgcttcaaccgactgttcgtgtcgatgatcttggtgacaaggtggaagactggtctaagcctgtcgagactgtgtaccataacgtggccatctatgcttccgtttcgcaggaggatgaggctgcggggcgtaactctgactatgagtattggtcgatgcttttcaagcagtctgttgttggtgctgattatcgttgcaggtggcgtatccggggtgttgtgtgggaggctgacgggtctcctatcgtgtggcatcatccaatgtctggctgggatgcgggcacgcagatcaatgtgaagcgtaagaagggctgatgggtagtggctcaggatgtgaatgtgaagctgaacttgccgggtattcgtgaggtgttgaagtcttctggggtgcagggcatgttggctgagcgtggcgagcgtgtcaagcgtgcagcctcggcgaatgtgggcggtaacgctttcgataaggcccaataccgtaatggtttgtcgtcagaggtgcaggttcaccgtgttgaggctgtcgctcgtataggcaccacatataagggtgggaagcgtattgaggcgaagcatggcacgctggctcgttcgattggggctgcgtcgtgatcgtctacgatgaccccaggaagtgggctaaacgcgtgctcaaggatgatggctggctgtctgggataccttgtactgggacagtgccggatagttttgagggtgaccttgtttggttggctcttgatggtggcccgcagttgcatgtgcgtgagcaggtttttttgcgggtgaatgtgttttctgatacgccggatcgggctatgtctttggcgcgtcgtgttgaggctgttctggctgacggggttgatggtgatccggtggtgttttgtaggcgttctacgggtcctgatcttctggttgatggtgcacgttttgatgtgtattcgctttttgagctggtgtgtcggcctgtcgaatccgagtaagcgtatcgttgtttttgttgattgatttttagtttgattgtttttgggggttatgatggctgcaacacgtaaagcgtctaatgttcgctctgctgttacgggtgacgtctatattggtaaagctcatgccggtgacgctattgatggtgtgaagacggttcctgaggggttgactgctttagggtatctgtctgatgacgggtttaagattaagcctgagcgtaaaacggatgatttgaaggcttggcagaatgcggatgttgttcgcacggtggctacagagtcgtctatcgggatttctttccagctgatcgagtctaagaaggaggttatcgagctgttttggcagtcgaaggttactgccggatccgattcgggttcgttcgatatttctcctggtgctaccactggcgtgcacgctttactgatggatattgtggatggcgatcaggttattcgctactatttccctgaggttgagttgatcgatcgtgacgagattgagggtaagaatggcgaggtgtatgggtatggtgtgacgttgaaggcgtatcctgcccagattaataagaagggtgatgcggtgtctggtcgggggtggatgacggctttaaaagctgatacccctccggttcctccgaagcctcagccgaatccgaatccgccgtccgataactgatacacgattttaggggattgttgatagatgagtgacgctggtttcacattgaagattggtgaccgtagctgggtgttggcggatgcggaggagacggctcaggctgttcctgcccgcgttttccgtcgtgccgccaggattgcccagtctggggagtctgcggatttcgcccaggttgaggtgatgttttccatgttggaggctgccgccccggctgacgcggtggaggccctggaggggcttcctatggttcgtgtggcggaggttttccgtgagtggatggaatacaagcctgagggtaagggtgcctctttgggggaatagtttggctccacggcctgattgatgattatcgtggggccatcgaatacgatttccgcactaaatttggtgtttctgtttatagtgttggtggcccgcagatgtgttggggtgaggctgtccggctggctggcgtgttgtgtaccgatacgtcgagccagttggcggcccacctgaatggttagcagcgcccgtttgagtggtgcgagtgggctgtgttggacatgctggatcattacaggtctgctaatagtgaggggcagccggagcctgtggcgaggcctacggatgagcgtagagcccggtttacgtctgggcaggtggacgatattttggcgcgtgttcgtgccggtggcggggtgtctcgcgagattaatattatggggtgaatagtgtatgtctggtgagattgcttctgcatatgtgtcgttgtatacgaagatgcccggccttaaaagtgatgttggtaaacagctttctggggtgatgcctgctgagggtcagcgttcgggtagtctttttgctaagggtatgaagttggcgcttggtggtgccgcaatggtgggtgccatcaatgttgccaagaagggcctcaggtctatctatgatgtgactattggtggcggtatagctagggcgatggctattgatgaggctcaggctaagttgactggtttgggtcacacgtcttctgacacgtcttcgattatgaattctgctattgaggctgtgacgggtacgtcgtatgcgttgggtgatgcggcgtctacggctgcggcgttgtctgcttcgggtgtgtagtctggcgggcagatgacggatgtgttgaagactgtcgcggttgtgtcttatatttcgggtaagtcgtttcaggatacgggcgctatttttacgtctgtgatggctcgcggtaagttgcagggcgatgacatgttgcagcttacgatggcgggtgttcctgtgctgtctctgttggctaggcagacgggtaaaacgtctgctgaggtgtcgcagatggtgtcgaaggggcagattgattttgccacgtttgcggctgcgatgaagcttggcatgggtggtgctgcgcgggcgtctggtaagacgtttgagggcgctatgaagaatgttaagggcgccctgggttatcttggtgctacggctatggcgccgtttcttaacgggttgcggcagatttttgttgcgttgaatccggttgtcaagtcggtgacggattctgtgaagccgatgtttgcgtcggtggatcagggtattcagcggatgatgccgtctattttggcgtggattaaccgtatgccgggcatgatcacgagaatgaatgcacagatgcgcgccaaggtggagcagctgaagggcatttttgcaaggttgcatttacctgtccctaaagtgaatttgggtgccatgtttgctggcggcaccgcagtgtttggtattgttgctgccggtgtggggaagcttgttgcagggtttgccccgctggcggtggcgttgaagaatctactgccgtcgtttggtgctttgaagggtgccgctggcgggcttggtggcgtgtttcgcgctttgggtggccctgtcggtattgtgatcggcttgtttgctgccatgtttgccactaacgcccagtttcgtgccgcggttatgcagctggttggtgtggttggtcaggctttgggccagattatggcggctattcagccgctgtttggtttggttgccggggttgtggcacagttggcgccagtgttcggccagattatcggtatggttgcgggtttggctgcccagctggtgcctttgattagtatgcttgtcgcccggctggttcctgtgatcacgcagattattggtgcggtgacacaggttgctgcaatgttgttgcctgcgttgatgccggtgttgcaggcggatgttgctgtgatacggcaggttgttgccggtttggctgtggggatcaccgggaatgccggtttggctttggatgcgatgtcgggtgtggcgggtcggctgcctgatgcggttgatgcccggtttggtgtgcgatcgtcggtgggctcgtttaccccgtatggcaggtatcagcgtgctaagggtgagagtgttgtggtgaatgtgaatgggcctacttatggtgatcctaacgagtttgcgaagcgggttgagcggcagcagcgtgacgctttgaacgcgttggcttacgtgtgattggagtgttgtgcatgtttattcctgacccgtctgatcgttctggtttgactgttacctggtctatgttgccattgattggtaatgatccggagcgtgtgcttcatttgacggactatacgggtgcgtctcctgtcatgttgttgaatgattcgttgcgcggcctgggtgtgcccgaggtggagcatttttctcaaactcatgttggggtgcacggctcggagtggcgcgggtttaatgtgaagcctcgcgaggtgacattacctgtgttggtgtcgggtgttgacccggatccggtgggcgggtttcgtgacggttttttgaaagcctatgacgagttgtggtctgcttttcctccgggcggggagggggagttgtcggtgaagactcctgccggtgttgagcgtgtgctaaaatgccggtttgattcggtggatgacacgtttacggtggatccggttaatcgtggctatgcgcgctatctgttgcatttgacagcctatgacccgttttggtatggggatgagcagaagtttcgtttcagtaacgcgaagttgcaggattggttgggtggcggccctgtcggcaaggatggcacggcgtttcctgtggtgttaacaccgggtgttggttcaggttgggataatctgtctaataagggtgatgtgcctgcgtggcctgtgattcgtgtcgagggcccgttggagtcgtggtctgtgcagattgatggtttgcgtgtgtcttctgattatcctgtcgaggagtatgattggatcactattgatacggatcctcgccagcagtcggcgttgttgaacgggtttgaggatgtgatggatcgtttgacagagtgggagtttgcgcctatcccgcctggcggttctaagagtgtgaatattgagatggttggtttgggtgccattgttgtgtcggtgcagtacaggtttttgagggcttggtgaatagttgatggctggtcttgttccgcatgtaacattgtttacgccggattatcgccgtgtggcgcctatcaatttttttgagtcgttgaaattgtcgttgaagtggaatggtttgtcgacgctggagttggtggtgtcgggtgatcattctaggcttgacgggttgactaggccgggtgcacggctggttgttgattatggtggtggccagattttttctgggcctgtgcgtcgggttcatggtgtgggtccgtggcgttcttcgcgggtgactatcacgtgtgaggatgatatccgcctgttgtggcgtatgctgatgtggcctgtgaattatcgtcccggtttggtgggttcggagtggcgtgctgacagggattatgcccactattcgggtgcggctgagtcggtggctaagcaggtgttgggggataaggcttggcgttttcctccgggtttgtttatgaacgatgatgagagtcgtggccgctatattaaggattttcaggtgcggtttcacgtgtttgccgataaactgttgcctgtcctgtcgtgggctcggatgactgtcacggtgaaccagtttgagaatgagaagtttgatcagcgtggtttagtgtttgattgtgtgccggcggtgacccggaagcatgtgttgactgccgagtctggttcgattgtgtcgtgggagtatgtgcgtgacgccccgaaggcgacatctgtggttgtgggtggccgcggcgagggccgggatcggctgttttgtgaggatgttgattcgatggccgaggatgactggtttgatcgtgtcgaggtgtttaaggatgcccgtaacacggattctgaacatgtgcatcttattgatgaggctgagcgggtgtcaggggagtctggggccacgtcggggtttaagatcgagttggcggagtcggatgtgttgcggtttgggcccggcaatctgatgccaggggatttgatctatgtggatgtgggctcgggtcctattgcggagattgtgcggcagattgatgtggagtgtgtatcgccgggtgacggctggacgaaggtgactcctattgcgggggattatgaggataatccgtcggcgttgctagcacggcgtgttgctggtttggctgcgggtgtgcggtatttgcaaaaattctaaaaagattaggggtttgttgtgggtattgtgtgtaaagggtttgatggtgtgttgaccgagtatgattgggctcaaatgtctggtctgatgggtaatatgccgtctgtgaaggggccggacgattttcgtgtgggtactactgttcagggtgccacggtgttgtgtgaggtttttccggggcaggcttgggctcacggggtgatgtgcacttctagtagtgttgagacggtgacagggcagctgcctggccccggtgagacccgatacgactatgtggtgttgtctcgggattgggagcagaacacagccaagttggagattgttcagggtggccgtgcggagcgtgcccgtgacgtgttgagggccgagcctggcgtgttccatcagcaactgttggctaccctggtggtgtcgtctaacgggttgcagcagcagcttgacaggcgtgctatagctgcccgtgtggcgtttggggagtctgctgcgtgtgacccgacccctgtggagggtgaccgtgtgatggttccttctggggctgtgtgggctaaccattcgggcgagtggatgctactgtctccgaggattgagacgggcactaagcagatcatgtttggcgggtctgctgtgtatgcttacacgatcccgtttgagcggccgttcggtgctccgccggttgtggtggcgtctatggctacggcggctgggggtacgacacagattgatgtgaaagcctacaatattactaatagtaattttagtttggcttttattacgaatgacgggtctaagccttctggtgtgcctgcgatagctaactggattgctgtcggcgtgtgaccgggctgttgttgtggcggatggtgtgatgtcggggggctgtggtgtcgtggtttactcctgcactggtggcctctatctgtaccgcattggccacggttttgggttcggttcaggctgccacatctaaatctcggaagcgtttgcggcggctgtcggctcaggtagatgcgatggaagagtatacgtggtgtgtgcggcgcgaggtgcgccagtttaacgcccggcttcctgacagggttgatccgattgttttgcctgagttgcctagtttcctgtcggacacgttggggggtgaatgatgagggagttggaggaggagaagcggcagcgccgcaattttgagaagttttcactggtgttgctgtttttgtcgcttgtgttgttggcggtggttgccgggggtgctttgcgtttcggggctgtatcctctgagcgggattcggagcaggcgagggcccagtctaatggtacagcggctaaagggttggctagcagtgtgaagcgggtgtgtgcttcgggtgggcgggagtcggtgcgtcttcaccagtctggtttgtgtgtggatgctgtgcgtgttgagcgtagcgtgcagggtgtgccgggtcctgccggtgagcgcggcccgcaagggcctgcaggtgctgatgggcgtgatggtgttaatggttcggctgggctggttggccctgttggtccgcagggttctcctggtttgaatggtgtgaaaggtcctgacgggttgcctggtgtgaatgggtcggatggccgtgatggtgttccaggccgtgcaggtgctgacggtgtgaacggcgttgatggcactgctggtcgggatggttcggccggtgagcgcggtgatgtgggcccttcaggtcctgccggcccgcaaggtgcacagggtgaacggggtgagcgcggccccgccggtgcgaacggatccgatggtaaagatggtaaggatggccgttctgttgcgtctgtgtactgttccgggggccgccttgttgtgaaatatagtgacggtgtggcttctacaatatcgggctcggtggcctgccagggtgtgaaaccgtcgcctatagtgactatatcatcccacaaatagaaaggagtggctgtgatggtagtgtttggtggtggtgtgtggtgaggtttattcctgcagcacatcactcggccggctcgaatagtccggtgaacagggttgtgattcatgcgacgtgcccggatgtggggtttccgtctgcctcccgtaaagggcgggcggtgtccacggcaaactatttcgtgtccccatcgtctggtggttcggcgcattatgtttgcgatattggggagacggtgcagtgcttgtcggagtctacgattgggtggcatgccccgccgaatccgcatagtttgggtatagaggtttgcgcagatggcggttcgcacgcctcgttccgggtgccagggcatgcttacactcgtgagcagtggctggatcctcgggtgtggcccgcggtggaaagagcggcggtgctgtgccggcagttgtgtgacaagcatggtgttccgaagaggaaactgtctgtggctgatttgaaggctggcaggcggggcatctgcgggcacactgatgtgacggatgcgtggcatcagtcggatcatgacgatccggggccgtggtttccgtgggacaggtttatggccgtcgtgaacggcggcagtggagagagtgaggagttaacggtggctgatgtgaaagccttgcgtgatcagattaaacaattgtctgctcagcttactggttcggtgaataagctgcatcacgatgttggtgtggttcaggtgcagaatggtgacttgcgtaagcgtgtcgaggctttgtcgtgggtgaagaatcctgtgacggggaagctgtggcgcactaaggatgctttgtggagtgtctggtattacgtgttggagtgtcgtagccgtattgacaggctcgagtctgctgttaacggtttgaaaaagtaatggtggtttgttgtgggtaaacagttttggttaggtttactggagcgggcggctaagacttttgtgcaaacgtttgttgcggtgttgggggtgacggcgggtgtcacgtatactgcggagtcgtttcgcggtttgccgtgggagtctgccctgataacagcaacggtggctgcggtgttgtcggttgctacatcgtttggtagcccgtcgtttgtggctgggaaacctaaaaccacggttgtggatgcgggtttggttccgcccgatgacgggggcatggttgagccgcacatgggggatgtgtcggatcctggcatgattgagcctgcagatgatgtgtatggttttgccggctatgtgcctcggcgtgcagccgagtctgaggttggcacggtagagtctactgttgcataattgaatatgtgtgtgccccagcggtgctgccacgatcgtgtggtggctgctgctggggcactatttttgtgtctatagtattctatgattcgttattgttgatggtttcctcaagcatctggtgcaggtggaggcaggctgagatagtatcgttggcctggtctagaacatcctggccgataacgccttcgtggttgtcgcggtggtagaggatggactgcatgatatcgtcggcctccgcttgcagtagttttgcctggtatgcgattctggcgagccagtctatggcttcatggcttgcctgtgtgtcgtccggcatgccatgggtgttgctgttgtttgtggggtgtcctgcactgtcgcagtcccacaggatttcgctgcactcgtctagcgtgtcctggtcgatgtcgagatcgtcgaggctgactcctttgacggtgaggttcacatcatcgagggagatgggtacatggtactggttttcgataccggcaacaatgttttccaactgttgcatgttggtgggttgttgttggacgatacggtgtactactgttttgagggcagtgtaggggatattggttgtgttgtccatcgtgttatgccattccttcgttatcgtctggcatgtagtatgtgctgtttgcgtactcggataacgtcatcagtgtttggtctgcccactgtttcacggtttgtcttgtcaccccgagtcgttgggcggccgacgcatatgtttggtcatacccgtatacttcacggaaggctgccaggcgggctagccgtttgcgctgtttggagggttcacatgtgagggtgtagtcgtctatcgctaattgtaggtcgatcatggtggcaatgttgttgccgtggtgttgtggcgcggttggtggtggtggcatgcccggctccacactgggtttccatgggccgccgttccagatccattgggcggcttggatgatgtcggcggtggtgtaggttcgggtcatgtgtcacccctggaacaggttgtcgaggttgtctggctggctggtggtgtcgaatcgtccgacgcagtggcagtagtcgtacatgagtttgatgatgtgttggtggtctcccaaataggtgttgccgctgatactgtaggtggctgtgccgtctttgctgatggtgtatttggcggtgatggtttcggggttttctgtgttggtgatgattgctgtggtggtggcgcctactgtttggagtatggtggtttgggttccgtcgtcgaggatggttgtgaccattgtggttctccttagttgctggtttggttgtcggctatggctgtgatttcttggacgggtttgggtaggtctaggtggtggactgttttgtttgctagtcgttgggcgacacggtagcacatttgggtccactggttgcctgtgagttggtggtattggttgcgtaccgcaatatatagtagagagtctcggtacaggtcgtctgggntgacagccgggtagcggcgggcnatattggtgcaggctttgtgtagctggtgttggtggtggggggttgcccattcccaatcagctgtggtggctaggtctgcttttgttggtcgtctactcatggtttttatctggctatctggtagttgtttggtgttttgttgttgatagtgtagcacacgagtccggggttgccgttggtgcccgtcttgtgcaggtaccagacggattctccttccatggatgggcgttggatgaaggtgcgttgtccttgctcggatatttcgaggtggtgccggtgtccggccatgagtatatgggatacggtgccgttgtggaattcttggccgcgccaccattcgtagtgttggttgttgcgccattggtgtccgtgggcgtgcaggatggtagccccggctacgttgacggtggtggtcatttcgtctcggctggggaagtggaagtgaaggttggggtattggttgttgagctggtaggcttctgcgatggcccggcagcagtccacttcgaaactatcgtcgtaggtggtgactcctttaccgaagcgcacggcttctccgtggttgccggggatggatgtgacggtcacattttggcagtggtcgaattggtggatgagttgcatcatggccatgcgggtgagcctgatttgttccgtcaagggtgtttgtgtgcgccaggcgttgttgccgccttgtgacacgtatccttcgatcatgtcgccgaggaaggctatgtggactcgttgcggctggcctgcttgctgccagtagtgtttagctgaggcgagggagtgtaggtagtcgtcggcgaagtgtgctgtttctcctccggggatgcctttgccgatttggaagtcgcctgccccgatgacgaaggccgcatcgctgctacgggtgtcggactgtttggggggtgtccattcggctagtttatcgacgagttcgtctacagggtaggggtcggttgcgggttggtggtcgatgattttttgtatggatcggcctgtttctccgttgggtagggtccattcggagatgcgtgtgcggcgtacggttccgttggcgagatcatcgcggatggtgtctgcttcgttgtcgtggttggctagctgggtgaggagccggtctatgttgtctatcatcgggtatcctcttccttttgtggagtggtgttggcttgtttgcggcgatagtctttgatgacggtggcggagatggggtatccggcttgggtgagttgttttgctagccaggatgcgggtatagacctgtcggcgaggacgtttgcggctttgcggccgtagcgttggatcaacgtttcagttttggttgccatgatgtcctaggggttgtgtggtgggctgccatcctgtgcggcagtcgccgtcgtgtcctggtttgcgtgtgcaccacgatgttgttccgtctgtgtggttgagtgttttgccgcacatgacgttttgtagatgctccggcagctcgctattgctatcgtcttgctcgtctagcaaagttttttgttgggtgaaaaactcggacacggtgccgttgtggactgggagtgtccatgttttccattgttgttgtagtcgggtgttccagtggaattgtttggcggcgttttctgcctgttttatggttttgtagtagccgacgagtatgcgctggtgttgctggtcgggcgggttttggcctcgccagtattgtgccgcgacggcgtaccggttgttgtcggtgaaggtgttccagcagtattggatgatgttgttgagggtgtcatctggcagatcgtctgggttgaggttggtggcctgggtgaggatgtctcggatggtttgaaggttgcgttttgtgggtttgaacgagatgctcacgatagtgccggctgttcgtcttgcatgaactggttgaaggtgttgttcccggcgtgttgggcttgtgtgatttgctggtcggtccagtcggggtgttgctgtttcagataataccagtggctcgcattgtaggtttcgttttgtagccgtgtgagatggttttcttcgatgatttgtttccacatggtccatgacacgtcgagccggttgaggatttcgagggctgggatgttaaactggtcgaggaagaggatttcgtgggtgtagtagtttttctcgtaggcgtcccatccgcttcggtgcctgttgggctggttttggggtaggcttcccggcagattttgtgtaaccgtttggccatgtcgtcgggtagtttaatgtcggggttggcgcggatcatggatcgcatcccatcataggtggtgccccaggtgtgcatgatgtaggtggggtcttcgccatcagcccatttctctgcacagatggcgaggcggatgcgcctcctggctgtttggctggtgttgcgccggttggggatggggcacgtgtcgaggggatccatgatgttttagtttacctttctggtttcgtgttgttgacgtgttttactgtagcacagtgtctagtgcttgtgtcaaccctgtttttccggcctgcaggtaggtgtctgtgacatccccgacagtgaggggcacatgggtggcttgcggtaatgcttgggttagggtttgggccatcttgtctcccgcggggtctgggtcggaccagatgtagatgtggtcatagcctacaaaaaatttggtccaaaaagtttgccacgaggttgcgccgggtagggcaacggccgaccatccgcattgttcgaggatcatggagtcgaattcgccttcgcaaatgtgcatttcggatgccgggttggccatggcggccatgttgtagatggagcctgtgtctcctgccggggttaggtatttggggtggttgtgggttttgcagtcgtgctggagtgagcagcggaaacgcatttttcttatttcggctgggccgccccaaacggggtacatgtatgggttggtgatgcgctggttgtagttttcgtggccgggtatggggtcattgtcgatgtatccaaggtggtggtagcaggctgtttcttcgctgatgcctcttgctgagagcaggtcgagtatgttttcgaggtgggtttcgtagagggccgaggctttctggattcggcggcgttccgcaatgttgtatgggcgtatactgtcgtacattcgggttttcttcttctaatcgttgttgtagcttggcaagtccgcctccgacaccgcatgtgtggcagtaccagacgcccttgtcgaggttgatgctcatggagggctggtggtcgtcgtggaacgggcagaggatgtgttgctcgttcttggatgggttgtaccgtatgtggtaggtgtcgaggaggcggcaggtgtcagaggtgtgggaggagttctgtgagggttgataccacataggcttcgctccatggcttgttgcgctgtttcatgacgacgaggccgatggtggactggttttcgcggtttcggtgggtttcgtagttgcgtgcctcaagggttgcttctttgacgaattgggcgaggtgtggctgtcctgctttcgcttcaatcacgtatgtgtggtttttggttttgaggatgaggtcgccttcgtcttcgcggccgttgaggtggaggcgttctatatcgtggccggtgtcgcgtagctggtgcaataatcgtgtttcccattcggcgcctgcccgccggtttcttgattgttgtgaagccatcatagtcctttgtgtgttgtggtcatgttccatggctgtttttcggcgaggggtccgaagaatgtgtattcggggtaggctcgtagccgctcgtatcgggtgccgtcggggcttgactgtccggtgcgctgtttgagtacggcgatgcgtgcctctgccggtatcgtgaggccgttgccattatcctcgccaccatacaatgagactccgaggatgagttgtggtttttcggagagcccgtttttgatttcccgcctagccggggggtgttcgatgtcggc

SEQ ID NO: 21 - DNA, 17114 bp, Pahexavirus sp.
  source 1..17114: mol_type = genomic DNA
aacatctggttgacaaggatgctgttgagtccggaaaggataacggcattgttgatacagtaaaagacgatggcgggcaggaggtagccgacaatcagttgaagaatgaaggcgagggtaaatcgccggggactgattggaaggctgaggcccgtaagagggagtctcgtgctaaaagtaatttcgccgagttggagaagcttcgcgcctcggatggtgatgcggggtctgtgatcgatgatcttcgccgcaagaatgaggaactcgaagaccggatcaatgggtttgttcttgagggtgtgaagcgtgctgttgcggccgagtgtggcttgtcgggtgatgcggtcgctttcttgcacggtagcgaccgtgaagcgctggtggagtctgctaaggctttgaagggtttgatcgaccatagtagtggctgcgcgggtgtgcgccgtcttgcggggagtgcccccgttgatgatgttaaacgacgtgagggtgtcgcgtttgtggatgctcttgtcaataattctaggagatgatttctgatggctgacgattttctttctgcagggaagcttgagcttcctggttctatgattggtgcggttcgtgaccgtgctatcgattctggtgttttggcgaagctttcgccggagcagccgactatttttggccctgttaagggtgccgtgtttagtggtgttcctcgcgcttagattgttggtgagggcgaggttaagccttccgcatcggtggatgtttcggcgtttactgctcagcctatcaaggttgtgactcagcagcgtgtctcggacgagtttatgtgggctgatgctgattactgtctgggtgtgcttcaggatctgatttccccggctcttggtgcttcgattggtcgcgctgttgatctgattgctttccatggtgttgatccggctacgggtaagcctgctgctgctgtcaaggtgtcgcttgataagacgacgaagacggttgatgccacggattctgctacgaccgatcttgttaaggctgtcggcctgattgcgggggctggtttgcaggttcctaacggtgttgctttggatccggcgttctcgtttgccctgtctactgaggtgtatccgaaggggtctccgcttgccggtcagccgatgtatcctaccgccgggtttgctggtttggataattggcgtggcctgaatgttggtgcttcttcgactgtttctggtgcccctgagatgtcgcctgcctctggtgttaaggcgattgttggtgatttctctcgtgttcattggggtttccagcgtaacttcccgatcgagcttatcgagtatggtgacccggatcagactgggcgtgacctgaagggccataatgaggttatggttcgtgccgaggctgtgctgtatgttgcgattgagtcgcttgattcgtttgccgtggtgaaggagaaggctgccccgaagcctaatcctccggctggaaactgattcatttgttgcgataatgtttatgctgtgtgcagggggtggtgttgatgggtatcattttgaagcctgaggatattgagcctttcgccgatattcctagagagaagcttgaggcgatgattgccgatgtggaggctgtagctgtcagtgtcgccccctgtatcgctaaaccggatttcaaatataaggatgccgctaaggctattctgcgcagggccctgttgcgctggaatgataccggggtttcgggtcaggtgcagtatgagtctgcgggtccttttgctcagacgacacggtctaatactcccacgaatttgttgtggccttctgagattgctgcgttgaagaagttgtgtgagggtgatggtggggctggtaaagcgttcactattacaccgaccatgaggagtagtgtgaatcattctgaggtgtgttccacggtgtggggtgagggttgctcgtgcgggtcgaatattaacggctacgctggccctttgtgggagatacgatatgaccagttttccttatggtgaaacggttgtgatgcttcaaccgactgttcgtgtcgatgatcttggtgacaaggtggaagactggtctaagcctgtcgagactgtgtaccataacgtggccatctatgcttccgtttcgcaggaggatgaggctgcggggcgtaactctgactatgagtattggtcgatgcttttcaagcagtctgttgttggtgctgattatcgttgcaggtggcgtatccggggtgttgtgtgggaggctgacgggtctcctatcgtgtggcatcatccaatgtctggctgggatgcgggcacgcagatcaatgtgaagcgtaagaagggctgatgggtagtggctcaggatgtgaatgtgaagctgaacttgccgggtattcgtgaggtgttgaagtcttctggggtgcagggcatgttggctgagcgtggcgagcgtgtcaagcgtgcagcctcggcgaatgtgggcggtaacgctttcgataaggcccaataccgtaatggtttgtcgtcagaggtgcaggttcaccgtgttgaggctgtcgctcgtataggcaccacatataagggtgggaagcgtattgaggcgaagcatggcacgctggctcgttcgattggggctgcgtcgtgatcgtctacgatgaccccaggaagtgggctaaacgcgtgctcaaggatgatggctggctgtctgggataccttgtactgggacagtgccggatagttttgagggtgaccttgtttggttggctcttgatggtggcccgcagttgcatgtgcgtgagcaggtttttttgcgggtgaatgtgttttctgatacgccggatcgggctatgtctttggcgcgtcgtgttgaggctgttctggctgacggggttgatggtgatccggtggtgttttgtaggcgttctacgggtcctgatcttctggttgatggtgcacgttttgatgtgtattcgctttttgagctggtgtgtcggcctgtcgaatccgagtaagcgtatcgttgtttttgttgattgatttttagtttgattgtttttgggggttatgatggctgcaacacgtaaagcgtctaatgttcgctctgctgttacgggtgacgtctatattggtaaagctcatgccggtgacgctattgatggtgtgaagacggttcctgaggggttgactgctttagggtatctgtctgatgacgggtttaagattaagcctgagcgtaaaacggatgatttgaaggcttggcagaatgcggatgttgttcgcacggtggctacagagtcgtctatcgggatttctttccagctgatcgagtctaagaaggaggttatcgagctgttttggcagtcgaaggttactgccggatccgattcgggttcgttcgatatttctcctggtgctaccactggcgtgcacgctttactgatggatattgtggatggcgatcaggttattcgctactatttccctgaggttgagttgatcgatcgtgacgagattgagggtaagaatggcgaggtgtatgggtatggtgtgacgttgaaggcgtatcctgcccagattaataagaagggtgatgcggtgtctggtcgggggtggatgacggctttaaaagctgatacccctccggttcctccgaagcctcagccgaatccgaatccgccgtccgataactgatacacgattttaggggattgttgatagatgagtgacgctggtttcacattgaagattggtgaccgtagctgggtgttggcggatgcggaggagacggctcaggctgttcctgcccgcgttttccgtcgtgccgccaggattgcccagtctggggagtctgcggatttcgcccaggttgaggtgatgttttccatgttggaggctgccgccccggctgacgcggtggaggccctggaggggcttcctatggttcgtgtggcggaggttttccgtgagtggatggaatacaagcctgagggtaagggtgcctctttgggggaatagtttggctccacggcctgattgatgattatcgtggggccatcgaatacgatttccgcactaaatttggtgtttctgtttatagtgttggtggcccgcagatgtgttggggtgaggctgtccggctggctggcgtgttgtgtaccgatacgtcgagccagttggcggcccacctgaatggttagcagcgcccgtttgagtggtgcgagtgggctgtgttggacatgctggatcattacaggtctgctaatagtgaggggcagccggagcctgtggcgaggcctacggatgagcgtagagcccggtttacgtctgggcaggtggacgatattttggcgcgtgttcgtgccggtggcggggtgtctcgcgagattaatattatggggtgaatagtgtatgtctggtgagattgcttctgcatatgtgtcgttgtatacgaagatgcccggccttaaaagtgatgttggtaaacagctttctggggtgatgcctgctgagggtcagcgttcgggtagtctttttgctaagggtatgaagttggcgcttggtggtgccgcaatggtgggtgccatcaatgttgccaagaagggcctcaggtctatctatgatgtgactattggtggcggtatagctagggcgatggctattgatgaggctcaggctaagttgactggtttgggtcacacgtcttctgacacgtcttcgattatgaattctgctattgaggctgtgacgggtacgtcgtatgcgttgggtgatgcggcgtctacggctgcggcgttgtctgcttcgggtgtgtagtctggcgggcagatgacggatgtgttgaagactgtcgcggttgtgtcttatatttcgggtaagtcgtttcaggatacgggcgctatttttacgtctgtgatggctcgcggtaagttgcagggcgatgacatgttgcagcttacgatggcgggtgttcctgtgctgtctctgttggctaggcagacgggtaaaacgtctgctgaggtgtcgcagatggtgtcgaaggggcagattgattttgccacgtttgcggctgcgatgaagcttggcatgggtggtgctgcgcgggcgtctggtaagacgtttgagggcgctatgaagaatgttaagggcgccctgggttatcttggtgctacggctatggcgccgtttcttaacgggttgcggcagatttttgttgcgttgaatccggttgtcaagtcggtgacggattctgtgaagccgatgtttgcgtcggtggatcagggtattcagcggatgatgccgtctattttggcgtggattaaccgtatgccgggcatgatcacgagaatgaatgcacagatgcgcgccaaggtggagcagctgaagggcatttttgcaaggttgcatttacctgtccctaaagtgaatttgggtgccatgtttgctggcggcaccgcagtgtttggtattgttgctgccggtgtggggaagcttgttgcagggtttgccccgctggcggtggcgttgaagaatctactgccgtcgtttggtgctttgaagggtgccgctggcgggcttggtggcgtgtttcgcgctttgggtggccctgtcggtattgtgatcggcttgtttgctgccatgtttgccactaacgcccagtttcgtgccgcggttatgcagctggttggtgtggttggtcaggctttgggccagattatggcggctattcagccgctgtttggtttggttgccggggttgtggcacagttggcgccagtgttcggccagattatcggtatggttgcgggtttggctgcccagctggtgcctttgattagtatgcttgtcgcccggctggttcctgtgatcacgcagattattggtgcggtgacacaggttgctgcaatgttgttgcctgcgttgatgccggtgttgcaggcggatgttgctgtgatacggcaggttgttgccggtttggctgtggggatcaccgggaatgccggtttggctttggatgcgatgtcgggtgtggcgggtcggctgcctgatgcggttgatgcccggtttggtgtgcgatcgtcggtgggctcgtttaccccgtatggcaggtatcagcgtgctaagggtgagagtgttgtggtgaatgtgaatgggcctacttatggtgatcctaacgagtttgcgaagcgggttgagcggcagcagcgtgacgctttgaacgcgttggcttacgtgtgattggagtgttgtgcatgtttattcctgacccgtctgatcgttctggtttgactgttacctggtctatgttgccattgattggtaatgatccggagcgtgtgcttcatttgacggactatacgggtgcgtctcctgtcatgttgttgaatgattcgttgcgcggcctgggtgtgcccgaggtggagcatttttctcaaactcatgttggggtgcacggctcggagtggcgcgggtttaatgtgaagcctcgcgaggtgacattacctgtgttggtgtcgggtgttgacccggatccggtgggcgggtttcgtgacggttttttgaaagcctatgacgagttgtggtctgcttttcctccgggcggggagggggagttgtcggtgaagactcctgccggtgttgagcgtgtgctaaaatgccggtttgattcggtggatgacacgtttacggtggatccggttaatcgtggctatgcgcgctatctgttgcatttgacagcctatgacccgttttggtatggggatgagcagaagtttcgtttcagtaacgcgaagttgcaggattggttgggtggcggccctgtcggcaaggatggcacggcgtttcctgtggtgttaacaccgggtgttggttcaggttgggataatctgtctaataagggtgatgtgcctgcgtggcctgtgattcgtgtcgagggcccgttggagtcgtggtctgtgcagattgatggtttgcgtgtgtcttctgattatcctgtcgaggagtatgattggatcactattgatacggatcctcgccagcagtcggcgttgttgaacgggtttgaggatgtgatggatcgtttgacagagtgggagtttgcgcctatcccgcctggcggttctaagagtgtgaatattgagatggttggtttgggtgccattgttgtgtcggtgcagtacaggtttttgagggcttggtgaatagttgatggctggtcttgttccgcatgtaacattgtttacgccggattatcgccgtgtggcgcctatcaatttttttgagtcgttgaaattgtcgttgaagtggaatggtttgtcgacgctggagttggtggtgtcgggtgatcattctaggcttgacgggttgactaggccgggtgcacggctggttgttgattatggtggtggccagattttttctgggcctgtgcgtcgggttcatggtgtgggtccgtggcgttcttcgcgggtgactatcacgtgtgaggatgatatccgcctgttgtggcgtatgctgatgtggcctgtgaattatcgtcccggtttggtgggttcggagtggcgtgctgacagggattatgcccactattcgggtgcggctgagtcggtggctaagcaggtgttgggggataaggcttggcgttttcctccgggtttgtttatgaacgatgatgagagtcgtggccgctatattaaggattttcaggtgcggtttcacgtgtttgccgataaactgttgcctgtcctgtcgtgggctcggatgactgtcacggtgaaccagtttgagaatgagaagtttgatcagcgtggtttagtgtttgattgtgtgccggcggtgacccggaagcatgtgttgactgccgagtctggttcgattgtgtcgtgggagtatgtgcgtgacgccccgaaggcgacatctgtggttgtgggtggccgcggcgagggccgggatcggctgttttgtgaggatgttgattcgatggccgaggatgactggtttgatcgtgtcgaggtgtttaaggatgcccgtaacacggattctgaacatgtgcatcttattgatgaggctgagcgggtgtcaggggagtctggggccacgtcggggtttaagatcgagttggcggagtcggatgtgttgcggtttgggcccggcaatctgatgccaggggatttgatctatgtggatgtgggctcgggtcctattgcggagattgtgcggcagattgatgtggagtgtgtatcgccgggtgacggctggacgaaggtgactcctattgcgggggattatgaggataatccgtcggcgttgctagcacggcgtgttgctggtttggctgcgggtgtgcggtatttgcaaaaattctaaaaagattaggggtttgttgtgggtattgtgtgtaaagggtttgatggtgtgttgaccgagtatgattgggctcaaatgtctggtctgatgggtaatatgccgtctgtgaaggggccggacgattttcgtgtgggtactactgttcagggtgccacggtgttgtgtgaggtttttccggggcaggcttgggctcacggggtgatgtgcacttctagtagtgttgagacggtgacagggcagctgcctggccccggtgagacccgatacgactatgtggtgttgtctcgggattgggagcagaacacagccaagttggagattgttcagggtggccgtgcggagcgtgcccgtgacgtgttgagggccgagcctggcgtgttccatcagcaactgttggctaccctggtggtgtcgtctaacgggttgcagcagcagcttgacaggcgtgctatagctgcccgtgtggcgtttggggagtctgctgcgtgtgacccgacccctgtggagggtgaccgtgtgatggttccttctggggctgtgtgggctaaccattcgggcgagtggatgctactgtctccgaggattgagacgggcactaagcagatcatgtttggcgggtctgctgtgtatgcttacacgatcccgtttgagcggccgttcggtgctccgccggttgtggtggcgtctatggctacggcggctgggggtacgacacagattgatgtgaaagcctacaatattactaatagtaattttagtttggcttttattacgaatgacgggtctaagccttctggtgtgcctgcgatagctaactggattgctgtcggcgtgtgaccgggctgttgttgtggcggatggtgtgatgtcggggggctgtggtgtcgtggtttactcctgcactggtggcctctatctgtaccgcattggccacggttttgggttcggttcaggctgccacatctaaatctcggaagcgtttgcggcggctgtcggctcaggtagatgcgatggaagagtatacgtggtgtgtgcggcgcgaggtgcgccagtttaacgcccggcttcctgacagggttgatccgattgttttgcctgagttgcctagtttcctgtcggacacgttggggggtgaatgatgagggagttggaggaggagaagcggcagcgccgcaattttgagaagttttcactggtgttgctgtttttgtcgcttgtgttgttggcggtggttgccgggggtgctttgcgtttcggggctgtatcctctgagcgggattcggagcaggcgagggcccagtctaatggtacagcggctaaagggttggctagcagtgtgaagcgggtgtgtgcttcgggtgggcgggagtcggtgcgtcttcaccagtctggtttgtgtgtggatgctgtgcgtgttgagcgtagcgtgcagggtgtgccgggtcctgccggtgagcgcggcccgcaagggcctgcaggtgctgatgggcgtgatggtgttaatggttcggctgggctggttggccctgttggtccgcagggttctcctggtttgaatggtgtgaaaggtcctgacgggttgcctggtgtgaatgggtcggatggccgtgatggtgttccaggccgtgcaggtgctgacggtgtgaacggcgttgatggcactgctggtcgggatggttcggccggtgagcgcggtgatgtgggcccttcaggtcctgccggcccgcaaggtgcacagggtgaacggggtgagcgcggccccgccggtgcgaacggatccgatggtaaagatggtaaggatggccgttctgttgcgtctgtgtactgttccgggggccgccttgttgtgaaatatagtgacggtgtggcttctacaatatcgggctcggtggcctgccagggtgtgaaaccgtcgcctatagtgactatatcatcccacaaatagaaaggagtggctgtgatggtagtgtttggtggtggtgtgtggtgaggtttattcctgcagcacatcactcggccggctcgaatagtccggtgaacagggttgtgattcatgcgacgtgcccggatgtggggtttccgtctgcctcccgtaaagggcgggcggtgtccacggcaaactatttcgtgtccccatcgtctggtggttcggcgcattatgtttgcgatattggggagacggtgcagtgcttgtcggagtctacgattgggtggcatgccccgccgaatccgcatagtttgggtatagaggtttgcgcagatggcggttcgcacgcctcgttccgggtgccagggcatgcttacactcgtgagcagtggctggatcctcgggtgtggcccgcggtggaaagagcggcggtgctgtgccggcagttgtgtgacaagcatggtgttccgaagaggaaactgtctgtggctgatttgaaggctggcaggcggggcatctgcgggcacactgatgtgacggatgcgtggcatcagtcggatcatgacgatccggggccgtggtttccgtgggacaggtttatggccgtcgtgaacggcggcagtggagagagtgaggagttaacggtggctgatgtgaaagccttgcgtgatcagattaaacaattgtctgctcagcttactggttcggtgaataagctgcatcacgatgttggtgtggttcaggtgcagaatggtgacttgcgtaagcgtgtcgaggctttgtcgtgggtgaagaatcctgtgacggggaagctgtggcgcactaaggatgctttgtggagtgtctggtattacgtgttggagtgtcgtagccgtattgacaggctcgagtctgctgttaacggtttgaaaaagtaatggtggtttgttgtgggtaaacagttttggttaggtttactggagcgggcggctaagacttttgtgcaaacgtttgttgcggtgttgggggtgacggcgggtgtcacgtatactgcggagtcgtttcgcggtttgccgtgggagtctgccctgataacagcaacggtggctgcggtgttgtcggttgctacatcgtttggtagcccgtcgtttgtggctgggaaacctaaaaccacggttgtggatgcgggtttggttccgcccgatgacgggggcatggttgagccgcacatgggggatgtgtcggatcctggcatgattgagcctgcagatgatgtgtatggttttgccggctatgtgcctcggcgtgcagccgagtctgaggttggcacggtagagtctactgttgcataattgaatatgtgtgtgccccagcggtgctgccacgatcgtgtggtggctgctgctggggcactatttttgtgtctatagtattctatgattcgttattgttgatggtttcctcaagcatctggtgcaggtggaggcaggctgagatagtatcgttggcctggtctagaacatcctggccgataacgccttcgtggttgtcgcggtggtagaggatggactgcatgatatcgtcggcctccgcttgcagtagttttgcctggtatgcgattctggcgagccagtctatggcttcatggcttgcctgtgtgtcgtccggcatgccatgggtgttgctgttgtttgtggggtgtcctgcactgtcgcagtcccacaggatttcgctgcactcgtctagcgtgtcctggtcgatgtcgagatcgtcgaggctgactcctttgacggtgaggttcacatcatcgagggagatgggtacatggtactggttttcgataccggcaacaatgttttccaactgttgcatgttggtgggttgttgttggacgatacggtgtactactgttttgagggcagtgtaggggatattggttgtgttgtccatcgtgttatgccattccttcgttatcgtctggcatgtagtatgtgctgtttgcgtactcggataacgtcatcagtgtttggtctgcccactgtttcacggtttgtcttgtcaccccgagtcgttgggcggccgacgcatatgtttggtcatacccgtatacttcacggaaggctgccaggcgggctagccgtttgcgctgtttggagggttcacatgtgagggtgtagtcgtctatcgctaattgtaggtcgatcatggtggcaatgttgttgccgtggtgttgtggcgcggttggtggtggtggcatgcccggctccacactgggtttccatgggccgccgttccagatccattgggcggcttggatgatgtcggcggtggtgtaggttcgggtcatgtgtcacccctggaacaggttgtcgaggttgtctggctggctggtggtgtcgaatcgtccgacgcagtggcagtagtcgtacatgagtttgatgatgtgttggtggtctcccaaataggtgttgccgctgatactgtaggtggctgtgccgtctttgctgatggtgtatttggcggtgatggtttcggggttttctgtgttggtgatgattgctgtggtggtggcgcctactgtttggagtatggtggtttgggttccgtcgtcgaggatggttgtgaccattgtggttctccttagttgctggtttggttgtcggctatggctgtgatttcttggacgggtttgggtaggtctaggtggtggactgttttgtttgctagtcgttgggcgacacggtagcacatttgggtccactggttgcctgtgagttggtggtattggttgcgtaccgcaatatatagtagagagtctcggtacaggtcgtctgggttgacagccgggtagcggcgggctatattggtgcaggctttgtgtagctggtgttggtggtggggggttgcccattcccaatcagctgtggtggctaggtctgcttttgttggtcgtctactcatggtttttatctggctatctggtagttgtttggtgttttgttgttgatagtgtagcacacgagtccggggttgccgttggtgcccgtcttgtgcaggtaccagacggattctccttccatggatgggcgttggatgaaggtgcgttgtccttgctcggatatttcgaggtggtgccggtgtccggccatgagtatatgggatacggtgccgttgtggaattcttggccgcgccaccattcgtagtgttggttgttgcgccattggtgtccgtgggcgtgcaggatggtagccccggctacgttgacggtggtggtcatttcgtctcggctggggaagtggaagtgaaggttggggtattggttgttgagctggtaggcttctgcgatggcccggcagcagtccacttcgaaactatcgtcgtaggtggtgactcctttaccgaagcgcacggcttctccgtggttgccggggatggatgtgacggtcacattttggcagtggtcgaattggtggatgagttgcatcatggccatgcgggtgagcctgatttgttccgtcaagggtgtttgtgtgcgccaggcgttgttgccgccttgtgacacgtatccttcgatcatgtcgccgaggaaggctatgtggactcgttgcggctggcctgcttgctgccagtagtgtttagctgaggcgagggagtgtaggtagtcgtcggcgaagtgtgctgtttctcctccggggatgcctttgccgatttggaagtcgcctgccccgatgacgaaggccgcatcgctgctacgggtgtcggactgtttggggggtgtccattcggctagtttatcgacgagttcgtctacagggtaggggtcggttgcgggttggtggtcgatgattttttgtatggatcggcctgtttctccgttgggtagggtccattcggagatgcgtgtgcggcgtacggttccgttggcgagatcatcgcggatggtgtctgcttcgttgtcgtggttggctagctgggtgaggagccggtctatgttgtctatcatcgggtatcctcttccttttgtggagtggtgttggcttgtttgcggcgatagtctttgatgacggtggcggagatggggtatccggcttgggtgagttgttttgctagccaggatgcgggtatagacctgtcggcgaggacgtttgcggctttgcggccgtagcgttggatcaacgtttcagttttggttgccatgatgtcctaggggttgtgtggtgggctgccatcctgtgcggcagtcgccgtcgtgtcctggtttgcgtgtgcaccacgatgttgttccgtctgtgtggttgagtgttttgccgcacatgacgttttgtagatgctccggcagctcgctattgctatcgtcttgctcgtctagcaaagttttttgttgggtgaaaaactcggacacggtgccgttgtggactgggagtgtccatgttttccattgttgttgtagtcgggtgttccagtggaattgtttggcggcgttttctgcctgttttatggttttgtagtagccgacgagtatgcgctggtgttgctggtcgggcgggttttggcctcgccagtattgtgccgcgacggcgtaccggttgttgtcggtgaaggtgttccagcagtattggatgatgttgttgagggtgtcatctggcagatcgtctgggttgaggttggtggcctgggtgaggatgtctcggatggtttgaaggttgcgttttgtgggtttgaacgagatgctcacgatagtgccggctgttcgtcttgcatgaactggttgaaggtgttgttcccggcgtgttgggcttgtgtgatttgctggtcggtccagtcggggtgttgctgtttcagataataccagtggctcgcattgtaggtttcgttttgtagccgtgtgagatggttttcttcgatgatttgtttccacatggtccatgacacgtcgagccggttgaggatttcgagggctgggatgttaaactggtcgaggaagaggatttcgtgggtgtagtagtttttctcgtaggcgtcccatccgcttcggtgcctgttgggctggttttggggtaggcttcccggcagattttgtgtaaccgtttggccatgtcgtcgggtagtttaatgtcggggttggcgcggatcatggatcgcatcccatcataggtggtgccccaggtgtgcatgatgtaggtggggtcttcgccatcagcccatttctctgcacagatggcgaggcggatgcgcctcctggctgtttggctggtgttgcgccggttggggatggggcacgtgtcgaggggatccatgatgttttagtttacctttctggtttcgtgttgttgacgtgttttactgtagcacagtgtctagtgcttgtgtcaaccctgtttttccggcctgcaggtaggtgtctgtgacatccccgacagtgaggggcacatgggtggcttgcggtaatgcttgggttagggtttgggccatcttgtctcccgcggggtctgggtcggaccagatgtagatgtggtcatagcctacaaaaaatttggtccaaaaagtttgccacgaggttgcgccgggtagggcaacggccgaccatccgcattgttcgaggatcatggagtcgaattcgccttcgcaaatgtgcatttcggatgccgggttggccatggcggccatgttgtagatggagcctgtgtctcctgccggggttaggtatttggggtggttgtgggttttgcagtcgtgctggagtgagcagcggaaacgcatttttcttatttcggctgggccgccccaaacggggtacatgtatgggttggtgatgcgctggttgtagttttcgtggccgggtatggggtcattgtcgatgtatccaaggtggtggtagcaggctgtttcttcgctgatgcctcttgctgagagcaggtcgagtatgttttcgaggtgggtttcgtagagggccgaggctttctggattcggcggcgttccgcaatgttgtatgggcgtatactgtcgtacattcgggttttcttcttctaatcgttgttgtagcttggcaagtccgcctccgacaccgcatgtgtggcagtaccagacgcccttgtcgaggttgatgctcatggagggctggtggtcgtcgtggaacgggcagaggatgtgttgctcgttcttggatgggttgtaccgtatgtggtaggtgtcgaggaggcggcaggtgtcagaggtgtgggaggagttctgtgagggttgataccacataggcttcgctccatggcttgttgcgctgtttcatgacgacgaggccgatggtggactggttttcgcggtttcggtgggtttcgtagttgcgtgcctcaagggttgcttctttgacgaattgggcgaggtgtggctgtcctgctttcgcttcaatcacgtatgtgtggtttttggttttgaggatgaggtcgccttcgtcttcgcggccgttgaggtggaggcgttctatatcgtggccggtgtcgcgtagctggtgcaataatcgtgtttcccattcggcgcctgcccgccggtttcttgattgttgtgaagccatcatagtcctttgtgtgttgtggtcatgttccatggctgtttttcggcgaggggtccgaagaatgtgtattcggggtaggctcgtagccgctcgtatcgggtgccgtcggggcttgactgtccggtgcgctgtttgagtacggcgatgcgtgcctctgccggtatcgtgaggccgttgccattatcctcgccaccatacaatgagactccgaggatgagttgtggtttttcggagagcccgtttttgatttcccgcctagccggggggtgttcgatgtcggc

SEQ ID NO: 22 - DNA, 15561 bp, Pahexavirus sp.
  source 1..15561: mol_type = genomic DNA
tggggccgttggattcgtggtctgtgcagattgatggtttgcgtgtgtcatcacagtatccggttgaggagtatgattggatcacgattgatacggatccccggaagcagtctgcgttgttgaacgggtttgaggatgtgatggatcgtttgacggagtgggagtttgcgtcgattccgccgggtggttctaagagtgtgagtattgagatggttggtttgggtgccattgttgtgtcggtgcagtacaggtttttgagggcttggtgaatggttgatggctggtcttgttccgcagttaacattgtttacaccggattatcgtcgcgtggcgcctatcaacttttttgagtcgttgaaactgtcgttgaagtggaatggtttgtcgacgctggagttggtggtgtctggtgatcattcgaggcttgacgggttgactagcccgggtgcacggctggttgttgattatggtggtggccagattttttctgggcctgtgcgtaaggtgcacggggttgggccttggcagtcatcgaaggtgactgtgacgtgtgaggatgatattcggctgttgtggcgcatgttgatgtggcctatcaattatcgtcctggcatggttggttcggagtggcgtgcggaccgggattatgcccactattcgggtccggcggagtcggtggctaagaaggtgttgcgggataatgcgtggcgttttccgccggatgtgtttctgaccgatgatgagaagcgtggacggttcattaaggattttcaggcccggtttcacgtgtttgcggacatactgttgcctatcctgtcgtgggctcggatgactgtcacggtgaaccagtttgaggatgcgaagccggatcggcgtggtttgttgtttgattgtgtgccggcggtgacccggaagcatgtgttgactgccgagtctggttcgattgtgtcgtgggagtatgtgcgtgacgccccgaaggccacgtcggtggtggttggtggccgcggcgagggtaaggatcggctgttttgcgaggatgttgattcgatggccgaggatgattggtttgatcgtgtcgaggtgtttaaggacgcccgtaacactgattccgagaaggtgcatcttattgatgaggctgagcgggtgttaggggagtctggggccacgtcggggtttaagatcgagttggcggagtcggatgtgttgcggtttgggcccggcaatctgatgccaggggatttgatctatgtggatgtgggctcgggtcctattgcggagattgttcggcagattgatgtggagtgtgtatcgcctggtgatggttggacgaaggtgactcctgtggcgggggattatgaggataatccgtcggcgttgctagcacggcgtgttgctggtttggctgcgggtgtgcgggatttgcaaaaattctaaaaagattaggggtttgttgtgggtattgtgtgtaaagggtttgatggtgtgttgaccgagtatgattgggctcaaatgtctggtctgatgggaaatatgccgtccgtgaaagggccggacgattttcgtgtcggcacgacgattcagggtgccacagtgttgtgcgatgtcctgccggggcaggcttgggctcacggggtgatgtgcacttctagtagtgttgagacggtgacagggcagctgcctggccctggtgagacccgctacgactatgtggtgttgtctcgggattgggagcagaatacagccaagttggagattgttcctggggggcgtgcggagcgtgcccgtgacgtgttgcgtgcggagcctggcgtgtatcatcagcagctactggctactttggtggtgtcgtctgacgggttgcagcagcagctggataggcgtgccgtggcggcccgcgtggcgtttggggagtctgccgcgtgtgatctacccctgtggagggtgatcgtgtgatggttccttctggggctgtgtgggctaatcatgccggtgagtggatgctgttgtcccctaggattgagacgggttctaagcagatccagtttggcgggtctgctgtgtatgcttacacgatcccgtttgagcggccgtttagtagtgcgcctgttgtggtggcgtctatggctacggcggctgggggtacgcagcagatcgatgtgaaagcctacaatgtgactgcccaaaattttagtttggcgtttattacgaatgatggttcgaagccgaatggtgtgcctgcggtggctagctgggttgctgtcggcgtgtgaatttgtttgttgtggcgtgatgccgtctgcgttggggggctggcgtgtcgtgggttactcctgcactggtggcttctgcgtgtacagcgttggccactattttgggttctgttcaggcggtcacgtctagatcgaggaagcgtttgcgccgcctgtcggcgcaggtggaagctttggaagagtatacgtggtgtgtgcggcgcgaggtgcgccagtttaacgcccggcttcctgacagggttgatccgattgttttgcctgagttgcctaatttcctgtcggacacgttggggggtgaatgatgagggagttggaggaggagaagcggcagcgccgcaattttgagaaggcttcactggtgttgttgtttttgtcgcttgtactgttggtggcgatggctgggggtgctttgcgtttcggggctgtatcctctgagcgggattcggagcaggctagggccgagtctaatggtatagcggctaaaggtttagccagtcgtgtaaagcaggtgtgtacccagggtggtgtggagtctgttaagcttcaccgttctggtttgtgtgtggatgctgcccgcacggagcggagtgttgcgggtgtgcccggtccggctggtgtgcgtggcccgcagggccctgcaggtgtggatggccgggatggtgttaatggttcggctgggcttgttggccctgttggtccgcagggttctcctggtttgaatggtgtgaaaggtcctgacgggttgcctggtgcgaatggatcggatggccatgatggtgttccgggccgtgcaggtgctgatggtgtgaacggtgttgacggtcgggatggttcggccggtgagcgcggtgatgtgggcccttcaggtcctgccggcccgcaaggtgcacagggtgaacggggtgagcgcggccccgccggtgcgaacggatccgatggtatagatggtaaggatggccgttctgttgtgtctgtgtactgttccgggggccgccttgttgtgaaatatagtgacggtgtggtttccacggtgtcgggctcggtggcctgccagggtgtgaaaccgtcgcctatagtgactatatcatcccacaaatagaaaggagtggctgtgatggtagtgtttggtggtggtgtgtggtgagatacattcctgcagcgcatcactctgccggttctaatcatccggtgaatagggttgtgattcatgcgacatgcccggatgtggggtttccgtctgcctcccgtaaagggcgggcggtgtccacggcaaactatttcgcgtccccatcgtctggtggttcggcgcattatgtttgcgatattggggagacggtgcagtgcttgtcggagtctacgattgggtggcatgccccgccgaatccgcatagtttaggtatcgatatttgcgcggatgggggttcgcacgcctcgtttagggtgccggggcacgcttacactcgggagcagtggcttgatcctcgcgtgtggcctgcggtggagaaggctgccatgctgtgtagacgtttgtgtgacaaatataatgttccgaaaaggaaactgtcggctgccgatttgaaggctggcaggcgtggtgtttgcgggcatgtggatgtgacggatgcgtggcatcagtcggatcatgacgatccggggccgtggtttccgtgggacaggtttatggccgtcgtcaacggcggtagtagtagtgatagtggggagttaactgtggctgatgtgaaagcgctgcatgatcagattaaacaattgtctgcgcagctcaccggttcggtgaataagctgcaccacgatgttggtgtggtacaggtgcagaatggtgatttgggtaaatgtgtcgatgctctgtcgtgggtgaagaatcctgtgacggggaagctgtggcgcaccaaggatgctttgtggagtgtctggtattacgtgttggagtgtcgtagccgtcttgacaggctcgagtctgctgtcaacggtttgaaaaagtgatggtggtttgttgtgggtaaacagttttggttaggtttgctggagcgggcgttaaagacttttgttcaaacgtctgtggctgtgttgggggtgacggcgggtgtcacgtatactgcggagtcgtttcgcggtttgccgtgggagtcggcgttgattacggccgcagtggccgcggtactgtctatagcgacgtcgtttggtaacccaacgtttgttgccggtaaaccaaaaacggcgcctgttgtggatgctgggcttgtgccgccggatgatcctggaatagtggagtctcacatggttgacgaaacggatcctggcatgatagagcctatagatgatgagaatgtggactatgtgccgaggcgtgcggccgagtctgaagttggcacagtagagtctgtgtgacaagtgtgtagatatagtttgtgccccagcggtgctgccatgtgtgtggtggttgctgctggggcactatttttgtgtctacaggggttttacaggttgtcgtctagggtgtcttcgagtgtctgttgtaggagtgcacactcggcgagggtgtcttcagcctggtcgacaatgttttgttttgctatgcctggatagttgtcgcggtgattgtagatggcttccagaatgttgtctgccatgatttgtagcgttagggcctggttggtgatgcattccagctcgtctatggcggcctggctagcctccggatgccggttgtccggatgttctgcaaggttgcagttccacaggatttcttggcatgcatccctggtgtctgcgtccacatcgatgtcgtctaggctgacaccgttggcgttgaggctgatgtggtcgaggttgatgggaaccagatattcgctgctgatgctgcaggtgatgtttgcgagttctgtcatgtttcgtggctgctgctgtatgaagcggcgggccgcggttttgatggctgtgactgttcgctgtctgttactgggcatggtttctattcctcttcatcgtagccggtgttgctggtggtgttggcgtattgggtgagtgtgatcagtgtctggtctgcccactgtttcacggtttgccgggtgacgcctaatcgtttggctgccacagagtatgtttggtcgtagccgtatacttccctgaacgcggccaacctagctaaatgtttccgctgtttggagggttcacatgatagggtgtagtcgtcgatggctagctgcaaatcgatcatggagacgatgttgttgccgtggtgttgtcgcgcggttggtgggggtggcatgcctggctccacactgggtttccatgggcctccgttccagatccattgggcggcttggatgatgtcggcggtggtgtaggttcggttcatgtgtcatcccctgaataggttgtcgaggttgtctaggttgttgctggtgggggtggtgtcgaatcgtccgacgcagtggcagtagtcgtacatgagtttgataatgtgttggtggtcgccgaggtaggtgttgccgctgatgctgtaggtggctgtgccgtttttcgcgatggtgtatttggcggtgatggtttcgggtgtttcggtgttggtgatgatggctgtggtggtggagcctactgtttggagcacggtggtttgggttccgtcgtcgatggtggttttaaccatggtgtgtgttttccctttcagttgctggtttggttgtcggctagatgaataatatcgggtaaaggtttcggctggtctaggtgttgtatggttttgttggctagccgtttggctaccctgtagcacattttggtgtagtgtttgttgtctaggttgtggtattgttcccgcaccgcaatatatagtagggcgtcttggtagaggtcgtctgcgctgattgcggggtagtgtccggctgttttggtgcatgcccggttgagtgtgcgaaggtgatggtctgtggcccatccccacgatgcggtggtggctaggtcggcttttgttggtcgtctgctcatagcatctcttttatctggctatctggtagttgtttggtgttttgttgtggatagtgtagcacactagtccggggtggccggtggtgcccgtcttgtgccgataccagacggattctccttccatggatgggcattggatgaaggtgcgctgtccttgctcggagatttctaggtggtgtcggtgcccggccatgagtatattggatacggtgccgttgtggaattcttggccgcgccaccattcgtagtgttggttgttgcgccattggtgtccgtgggcgtgcaggatccgtgtgccggccacatcaacggtggtggtcatttcgtccctgtcggggaaataaaagtggaggttggggtattggttggtgagttggtaggcttctgcgatggcgcggcagcagtctacgtcgaaggagtcgtcgtaggtggtgactcctttgccgtagcgcacggcttcaccgtggttgccggggatggatgtgactgtcacgttggcgcagtggtcgaactgatggatgagttgcatcatggccatgcgggtgagcctgatttgttccgtcaagggtgtttgtgtgcgccaggcgttgtttccgccttgtgacacgtatccttcgatcatgtcgccgaggaatgcgatgtggactcgttcgggtttgcctgcctgttgccagtagtgtttggcgactatgagggagcgtaaatagtcgtctgcgaagtgtgctgtttctccgccgtggatgcctttgcctatttggaagtctcctgccccgatgacgaatgcggttttactgtctgttgtggtgttgtctgttgtgggtggctgccagtcggctagcttagctacgagttcatctacagggtaggggtcggttgcgggttggtggtcgatgattttttgtatggatcggcctgtttctccgttgggtagggtccattcggagatgcgtgtgcggcgtacgtttccgttggcgagatcatcgcggatggtgtctgcttcgttgccgtggttggctagctgggtgaggagccggtctatgttgtctatcatcgggtatcctcctcttccttgtgtgtggtggtggcttgtttgcggcggtagtctttgatgacggtggcggagatggggtatccggcttcagtgagcatccgggctagctgtgtggcggggatcgtcttgtcggcgaggacgtctgcagccttgttgccgtagcgttggatgagggtttcagttttggttgccatgatgtcctatcggttgtgtggtgggctgccatcctgtgcggcagtcgccgtcgtgtcctggtttgcgtgtgcaccacgatacggttccgtctgtatggtggagtgtttttccgcacatgacgttttgtagatgctccggcagtgcggcgtcaccctggttgctggtttgtgtgtcgaagagtgttttctggttgatgaaatgctctgacacggtgccattatgtacgggtagtatccatgttttccattgttgttgtagcctggtgttccagtggaattgtttggccgcgttcgtggcttgtttagcggttttgtagtagccgactagtatgcgctgatgtttactgtcgggtgggttttggcctcgccagtattgtgccgccacggcgtagcggttgttgtctgtgaagcgctgccagcagtactcaataatgtgtgataacaccttgtcgggcatgtctcgtacttggttttcgtcgagccacgcgtcgacaatgatgttgcgtatggcttgcttgtctttggtggtgggtttgaacgagatgctcacagtacgggcctgtcgtcttgcatgaactggttgaaggtgttgttcccggcgtgttgggcttgtgtgatttgctggtcggtccagtctgggtgttgctgtttcagatagtgccagtggcacgcattgtaggtctcgtcttgtagccgtgcgagatggttttcggtgatgatttgtttccacatggcccatgacacgtcgagccggttgaggatttcgagggctgggatgttgaactggtcgaggaacaggatttcgtgggtgtagtagtttttctcgtaggcgtcccatccgcttcggtgcctgttgggctggtttttggggtaggcttcccggcagattttgtgtaaacgcttggccatgtcgtcgggtagtttaatgtcggggttggcgcggatcatggatcgcatcccatcataggtggtgccccaggtgcgcatgatgtaggtggggtcttcaccatcggcccatttttctgcacagatggcgaggcggatacgcctcctggctatttggctggtgttgcggcggtgggggatggggcacgtgtcgaggggatccatgatgttttagtgtacctttctggtttcgtgttgttgacaggttttactgtagcacagtgtctagtgcttgtgtcaaccctgtttttccagcctgcaggtaggtgtctgtgacgtcaccgagggtgaggggcacatgggtggcttgggggagtgctgcctggagggtttgggccatcttgtctcccgcggggtctgggtctgaccagatgtagatgtggtcgtagccttcaaaaaatttggtccaaaaagtttgccacgaggtggccccaggcagtgctacagccgaccatccgcatggttcgaggatcatggagtcgaattcgccttcgcaaatgtgcatttcggctgccgggttggccatggcggccatgttgtagatggagcctgtgtccccggctggggttaagtatttggggtggttgtgggttttgcaatcatgctggagtgagcagcggaaacgcatttttcgtatttcggctgggccgccccaaacggggtacatgtatgggatggtgatgcactggttgtagttttcgtggcctgggatggggtcattgtcgatgtatcaaaggtgttggtagcgggctgtttcttcgctgatgcctcttgctgagagcaggtcgagtatgttttcgaggtgggtttcgtagcgggccgaggctttctggattcggcggcgttccgcaatgttgtatgggcgtatgctgtcgtacattcggtttttcttcttctaatcgttgttgtagtttggcgagtccgcctccgataccgcatgtgtggcagtaccagacgcccttgtcgaggttgatgctcatggagggctggtggtcgtcgtggaacgggcagaggatgtgttgctcgtttttggacgggttgtagcgtatctggtagtggtcgaggaggcggcaggtgtcagaggtgtgggaggagctcgttgagggttgataccacataggcttcgctccagggtttgttgcgttgtttcatcactacgagtccgatggtggaattgttttgtttgtttcggtgtgtttcgtagttgcgtgcctcccggctggcttgtttcacgaattcggcgaggtgtgcctgtcctgctttggcttcgatcacataggttttgtggccggttgtgaggatgaggtcgccttcgtcttcgcggccgttgaggtggaggcgttcgatattgtgtccggtgtcgcgtagctggtggaggagtcgtgtttcccattcggctccggcccgccggttgcgtgactgttgtgttgacatgatagtgctttgtgggttgtggtcatgttccatggctgtttttaggcgagtggcccgaagaatgtgtattcggggtaggctcgtagccgttcgtatcgggttccgtctgggctggatttgccggtgcgctgtttcaacactgcgatgcgtgcctcggcggggatggtgagcccgttaccgttgtcttcgccaccgtagagtgatactcccaatatgagttgtggtttttcggagaggccgtttttgatttcccgcctagccggggggtgttctatgtcggttccggttttgtcggttgcgtggtgtgtgacaataatggtggagccagtatctctacctagtgctgtgatccattgcatggcttcttgttgggcttggtagtcactttcgcagtcttgaatgtccatgaggttgtcgataacaatgagtggtgggaaggtgttccacatttccatgtaggcttgcaactccatggtgatgtcggtccaggtgatgggtgactggaatgagaatgtgatgtgttcgctgtggtggatgctgtctcgatagtattctggcccgtagttgtcgatgttgtgttgtatttcagcggtggtgtgttgtgtgttgagtgagatgattcgtgtggaggcctcccagggtgtcatgtcccctgatatgtagagggcgggctggttgagcatggcggtgatgaacatggctagcccggatttttggctgccggagcgccccgcaatcatgactaggtcccctttgtggatgtgcatgtcctggttgcggtagagggggtctagttgtggtatgcggggcagttcggcagctgtttgggaggctctctcgaaggatcgttgtagagagagcatcggaaccttatctatctatcggttggatgtgtattggtggtcagatggagtcgatgtccacatcatcactaccagtggtgttgggctggctgtctcgccgatcaacatatgctgctacgaggtcgtagatggcgtcatccaatggtttgagaataacggcgttgaacccgtttttggtgcgcacagtggctagtttgaaggcctgctcttctcccaggtaggtttcgagttcgcggatcatggagtgtggccggtcgttgttgcctcgcgccttctcaatgatagcgttggggatggtttctggggtgccgttgttgaggtcgtcgagggtgtggaagattgtgacatcggcgtagatgcggtctgcggtctgtccaccgtagccttcagtgttgtgttccacgtcgtggactttgaaggcgatggcggtggcgtcctggtttttggacggattgaagaaggtgccgttgctgttgttgttgcggtagtttgcgagtcccattattgtttcctttactgttttgttggttttatcgggtgaggctgtttcgtttagtgcggaaagcctcggatacgtcactgttactggtgatgatctttttgtactgtttgagtaggtcggctagctgtgctttgctggtggcttgattgattttgtcgatgacgatggtgttttctttggatgcgatgttgtccacgtagtctttggctgcctggttgtatcggtcttggaggatgattgatgcgctcgctacgagtgttgctagatcccaatcctcggagacggtgttgtctttgagtccgcctagcaggtcgatgatggcctgttttgtctgcgctgctgtgtctcctcggatgactgtccatggtgcagcatagtctccaccgtatttgagtgtgatcgtgagtcgatcattgtcgatcttgtctttatcggtcatttggtgttcttttctttattgtctgtttctggtggctgtacggttgattctatcgggtatctgtacgagtttttgccgttgacggcccagcaggcgtcttgtacggggcagcctttacagagtgtggtgacgtggggtacgaagatgccttgactgattcctttcattgcttgactgtacatggatgatacatgccggtaggtgttgttgtcaagatcgtacagttcggttgctgtgccctgggtttgggttgtggtgttgtttcggctgctggcgggtgtccaaaacatgcctttcgtgacatggataccgtgttggttgagcatgtaccggtatgtgtgcagctgcatactgtcggcgggtaggcgtccggttttgaggtcgaggatgaaggtttcgccggtgtcggtgtcggtgaagatgcggtcgatgtagccgactatttttgtgtcatcgtcgaggatggtttctaccgggtattcgatgcccggctcgctatcaataacagcgatagcatattctggatggttgcgcctccatgttttccagcggtccacaaaggtggggccgtaaaccatccaccagtcgtagtctttcttgtgtggcccgcccgactcgaacatgtttttgcatattctgccggagggtttgatttctgtgccttcggattcggcgagggcgacttgggtgtcgaaaatgtttttgaaggatgcgagtttgtctggcagtgcagggtattcgtcgggattgtacaggtgtaggtcgtattgttcggtgatgtggtgtatggcgcttccggcgatggtggcgtaccaggtgtggtgttgggcgtggtagccgtgttggaggcgccatttttctccgcattcggcccactgggtgagtgaactgtaggagatgtggcctggatggtggatggttttcgggtattgtgctagaggcattacttgtcgcctttgtgggtgttccatgggttgcgggtgtcttggccggcctggtgctgctggtatgcgaggagtgcgaggcagtgccaggcagcatgggctagatgtggtagcccggattcataatcgaggttgttgccttgctgccatgatagcagatggcggtagagggcgtcgacactgtggctccacgggtagccgccggtccagttgttgtcgccgtatttggtggcaccgtatccggctacttcgccgagcgagtggagggctgccgggtcgatgagggatagcctgcagagttttagttcttttcgggcaccggtgtcggggttggtgtatatgcgggttggctcatccatggggtgtgtgctccttgagtgtgggttactggttggggttgtgggcgagtgctatggcgaggatgatgatggcgatggtttctgcgatgatgatgtgtgttttgatcatttggtgtttagggggttgttggtgagtgtggaggcgcctaggaggttggtgagtgcgcatgcggcgatgatggcgagggctgccttgtgtggggtgccggtggcgtacatccatgtgatgatgccgccttggatccaggctaggctggtgaagaacgtttcgtagctgtgtagctcaatgttgttgttgggtgtgttcatgcttgctcctgaagaatggtgttgatggttttataaatgttgtacaggttggtttcgatagataacagttggtggatttggtggtcgagatcaatgtttgggttgagggtgttgatgcgggaggcaatatcggtggcggtgcgtagtgtgccgccggtgtggtgaataatgtgtgccatgtcggcgaggccggtggtgacagcatagtgggagaggagaggcatagcggtccttggcgggttagtgttgcgggttgatgttgaggtcggtgacgtggggtgtgttttctgttccggtgacgaggcagtgaacagtgacagggagtttggaggctcccggctgacggatggtggcgccgtagacgatgctgaaggtgtctttgtcaatgattttgtggagttggaggtcgatgtcggggttgccgttccatttgacgccttgggcggcggcctgctgttcggctttacggtcgcaggtgtgtgcggcggtgatcatggtgagaccccgtgaggtttcttcaccccttgcttgggcttgcttgtgggttttggcctgctcggctcgcagtgagtgttctgcggctgcctgccgtgctttcttctcagccttgcgctgttggacggttttgggggtccattcggtgtttgctgtggtggcttgtggggcgggctgtgaggcgagtggcgggttgtcgtctggggctggcaggaaggaggctgcggcgatgatggcggctgtgatgcctgcgatggtgtagccttttttcttgttcatgactgttgtcccctttccggggtgttgttcgttgctgacatgattaatcatggtgtgggcggttcctcatgtcaaggctgcgctcaacgattgtgagcgtttggtgtgtggctaggggttttatcgggcacacagggttagcaggtggccaatattgatgcgggtcacgttccagtagagttgtgtggcttctccgccggtgagtggcttccactcgttgtggctgaacacggtgccgtcggcggcgatgaatgtgttggggcgtagcttgtggagttcggcttccacgctttgccggtaggcttcggcgaggccctcgaaatccatgtggtcgcaggagaggttttcgaggcgtgtcaggtcgaagggtgtggggcagtcgtagctggcgggggtgtagagctgggtgacgtggttggcgatcttctgcatgattatgtccttttcttaacgtggagagtgtttgggggtttatagggtggatgcggcaaggatggcgtctacgtcgatcatgtcgatgagatcgtggagttcctcggcctcagtatcggagaggtggcgccagccgggtggcccatacacggcgccgtcgagggtgagggtccagtcaggtcggatgagtcgtatggcttcttcgactttagcgtggtacatgcggcgcaccatctccagatcgatgtcgtctgaatggtcttcggtgaggctgtggaggctgagcgggttgatttctgtctgcccgtagaggctggtgaatgatggtgtgatgagtgtgccatccatgagtgatgttcctttcggtggtgtagtggttgttgtggtttctagagtgtgtaggttgcgacccacagtcaaggtggcgctcaatcggattgagcgtttcatggggtgtggcatggaatctacacccttatgctgtgtgagataggccacattctcctggcttggtgtgcaccctcgaggccactctgccgatctagcgtgaagggtatagcccagaaataccgtttaaagccttcacacggcgcctaggagcgccttacagggtgggggctaggtattcatacccccaagcaattctgatcgattctagacgcctcccagagccggatacacgatccgctatccagacgcagatcatcagcccctatcctggttagctaagcctcaactatgtggacagtgtgggatactaagggggaagaaggacacggtaaaagaaagaagggggagcatcagcactcaagccttaaggtcttagcgcttagcaccgatggtcttagcagttaacaccgagcccctcaagggctcggcatcagcccgagcaggctcagctcatcaggcacagccctgaaaggggtacacgccatcatggaaggcttgagagtacgaggagccctagcgactagtactcgaaatcctgagggaacacccatcggcactgatgggtctagcgtgttcgtaaaggacacaag

SEQ ID NO: 23 - DNA, 15013 bp, Pahexavirus sp.
  source 1..15013: mol_type = genomic DNA
ccagacacaacatcaacctaataccgatccaacatacccataaaagccttcacatgagcactaagcgaagccaccaaatccgcgcgaccctcacgccacacacaatcatgaatcaccgcagcatccatgagaaacaaccactcctcatcagacacgtactgcgcgcggctatcctcaccccacacacgccaccaacgacgcgtcaccccacaccactcacgagacccaggaagctcaggctgcacaacacccaccaccaacacaaaaagtcgacaaacagacaaatccacaaaagggaggtatttcactaagccgtacgaggtcttgcacgggtgtgcagggggtgtccccggtgggggttggcgggtttttcaccatggaatcaatgtttttgtggtttgttgttggaacttgatgtatggttcgctgcgattgcctttgcttctgttgcatgttctgcagatgatttgcccgttgtcgagggtgttgagtcctcccctgctgacgggtgtgatgtggtcggcttcggggctggttggtagatcgtgtgtgtcccaggctatcggggttccgcagagtgggcattcggtttggccttgttgtcgggcttgggtgatgagtcttgcccgccagcgccggtgtgaggcggatgcggtgcggttggtgtgtgccatcatgtcccctgatctcctatggcccctgtgagcctctcatggctcctgtaacggcttgggaaccgttgggggtatgaataccttgcccttgccctgctgttcgattctgggggctgttttgttcgtttgagggggtgttctgtttgtggtggggtgtttgttttctccaccaccccccatgggtgtgagaaagatcacatcgccccccagctgtgtcaaaagaagaaggacacgaaagaaaaagggggtgggtgtatgttcgcgtttcacagcttaccgctaggcgcctagcggtataggacacaggctaagcgggaacaccttagaggtttttaaagtcttctacctataatatacactttaagtcttacctagtgttaagggtgtgagcgtgacacgctgtacgccttaagccgaacacgccaagccgtaaagggacacgggtgtaagagtgtggggagtgtgcaaccgggagcgtgcgaccggtggtacacgagacacacggttgaaagcccatcagcgctgatgttaaaggttcctcttctcccctgatgaagaaaagaagagaagagagaaagaaccaaagagagaagagaagtaaagaagttaacctcttagctcttctaaaacttttataacttataagctttaatacttatataataatattaaagtttaagactgatggttaactttaagtatttaaggtctttatagcttataagcctttaagtattaatatttactttaagttttaaagtcttaaacactgatgttaagtttatatccttaagtgcttaacctttaaggttttatacttaacttagatgttaaggttatatatttactttaagactttaaagctttaatgtttatttataaccttaagtgctaagcttttaaagttttatatgtactttaagtgtttaagtgtttggtagactgatggatgtaagggtgaaagccgcgtcagcggatttcggccttgcgtccagctggctacctgtccagcctatcatatgccacctgggatgagtcaaactggtggttttggctctataggcgggtttgaggggtgtaaacgggtgtttttggtagtaaaggtccaaaaattaaacctaaacttttccttaaattttcttagagtcttgtaacctttgagggtggttcaggctgaaacccctagtcagaacgggtttcactcccgaacagctgtcacactgtactcctgtgtcctttccgaacacgctaggcccatcagtgctgagggtgttccctcaggctttcgagtactcgtcgctaaggctcctcgtactctcaagccttccctgatggtgtgtactcctttcagggctgtgcctgatgagctgagcctgttcgggctgatgccgagcccttgaggggctcggtgctaagtccatcagtgctaagaccctaaggctgatgcccccttctttcttttaccgcgtccttcttcccccacagtatcccacactgtccacatagttgaggcttagctaaccaggataggggctggtggtcggcgtctggatagcggatcgtgtatcggtctcctggaggcgtctagaatcgatcagaatatgctgggggtaaaatacctcgcccccaccccgtaaggcgctcctaggcgtacccctgaagctttgaacggcatttctgggctacaccctccacgccagatcgacagagtggcctcgagagtgcacaccaagccaggggagtgtggcctatctcacacagcatgaggggcatggaatccatgcctagatctaccttgacccccgtcacgaaagccaaggtagatctaccgaacctgctatcacccagacatacccctgaaacgccctagaaggcccctagaatcgatcagcagggccaaccctgcataatcctaccctcagaagatttgagacgccgagagaggcaataaaggcttcagtgacatctgtcacacccgacacaccctccatgaaacgcgcaatccgaatgagcgcagccttgactcccggttgcaacctacacactctagaaaccacaacaaccaacccagacagtccagaaaggaacatcacccatggatggcacactcatcacaccatccttcaccagcctctacgggcagacagaaatcaacccactccaccccgcacacctggcaggatgtgacataggcaacacccacacgtctatcatctgccgcctataccgtgccaaagtcgaagaagccgtacgactcatccgaccctactggacggtcacccgcgatggcgccctatacgggccacccgactggcgccacctatccgagaatgaggccgaggaactccacgatctcatcgacatgatcgacgtagacgccatccttgtcgcatccacccgataaaccctcaacacaactctccacaccaagaacaagaaaaggaaagaatcatgcagaagatcgccgaccacttcacccagctctacacccccgccagctacgactgccccacacccttcgacctgacacgcctcgaaaacctctcctgcgaccacatggattttgaggggctcgccgaagcctaccggcagagcgtggaagccgaactccacaagctacgccccgacaaattcatcgcctccgatggcaccgtgttcagccaccacgagtggaagccactcaccggcggtgaagccacacaactctactggagtgtgagccgcatcaacgtaggccatctactcaccctatgtgcccgataaaacccctagtcacacaccaaacgctcacaatcgttgagcgcagccttgacatggggaaccacccacaccatgattaatcatgtcagcaacgaacaacaccccggaaaggggacaacagtcatgaacaagaaaaaaggttacaccatcgcaggcatcacagccgccatcatcgccgccgcctcatttatgccagccccagacgacaatccgccactcgcctcacagccagccccacaggccaccacagccaacaccgaatggacccccaagactacccaacagcgcaaagccgagaaagcggcacggcaggcagccgccacccgctccctacaagccgaacaagccaaagcccacaagcaagcccaaacaaggggtgaagaaaccgccaccggactcaccatggtcacggcagcacacacctgcaaccgcaaagccgaacaacaggccgccgcacacggcgtcaactggaacggcaaccccgacatcgacctccaactccacaaaattattggtaaagacacctttagcatcgtctacggtgcaaccatgaaacagcccggcgcatcagaactcccagtcaccgtccactgcctcgtcaccggaacagaagaacaccccaacgtcaccgacctcaacatcaacccacaacactaacccgccaaggagcatccccgctatgtctctcctctcccgctacgctgtcaccaccggcctcgccgacacggcacacattattcaccacaccggcggcacactacgcacagccaccgacatcgcctcccgcatcaacaccctcaacccagacattgatctcgatcacgaaatccaccaactgttatctattgaaacagacctgtacaacatttataaaaccatcaacaccattcttcaggagcaagcatgaacacacccaacaataacattgagctgcacagctacgaaacgttcttcaccagcctagcctggatccaaggcggcattatcacatggatgtacgcaaccggcaccccacacaaggcagccctcgccatcatcgccgcatgcgccctcgccaccctcctaggtgcatcaacactcacctaccatccccgagacactaaatgatcacaacacccatactgatcgctgaaaccctcgccatcattattctcgccgtagcactagcccacgacaacaaccagtaacccacacttaaggagcacacaccccttggatgagccaacccgcatgtacaccgaccccaacaccggtgcccgaaaagaattgaaactctgcaggctctccctcatcgaccccgcagccttgcacgatctaggctctgtggcaggctacggtgccaccaaatacggcgacagcaactggaccggaggatacccgtggagccacagcgttgacgccctctaccggcacctactatcatggcagcaaggaaacaacctcgaccacgaatcacatttgccgcatctggcccatgccgcctggcactgcctcgcactcctcgcctaccagcaacacgatgccggccaagacacccgaaacccatggaacacccacaaaagcgacaagtaatgcctctagcacaatacccgaaaaccatcggccatccaggccacatctcctactcatcactgtcacagtgggccgaatgcggagaaaaatggcgcctatcccacggctaccacgcccaataccacacctggtacgccaccatcgccggaagcgccatacaccacatcaccgaacaatacgacctacacctgtacaatcccgccgaataccctgcgctgccagacaaactcgcatcctttaaaaacattttcgccacacaagtagccctcgccgaatccgaaggcacagaaatcaaaccctccggcagaatatgcaaaaacatgtgtgagtcgggcgggccacacaagaaagactacgactggtggatggtttacggccccacctttgtggatcgctggaaaacatggaggcgcaaccacccagaatacatcaccgctgttattgacggccagccaggcatcgaatacccggtagaaaccatcctcgacgatgacacaaaaatagtcggctacatcgaccgtatcttcaccgacactgacaccggcgaaaccttcattctcgacctcaaaaccggacgcctacccgccgacagtctgcagctgcacacataccggtacatgctcaaccaacacggcatccatgtcacgaaaggcatgttttggacgccagccaccagccgcaacgacgacaagtccccgacacaaggcacatctaccgaactctacgaccttgacaacaacacctaccggcatgtatcatccatgtacagttaagcaatgaaaggaatcagccaaggcatcttcgtaccccacgtcacaacactctgctaaggatgccccgtacaagacgcctgctgggccgtcaacggcaaaaattcgtacagatacccggtagaatccaccgtacagccaccccaaacagacaataaagaaaaggacaccaaatgaccgataaagacaagatcgacaatgaacgactcacgatcacactcaaatatggaggagactatgctgcaccaagggcggtcatccgaggagacacagcagagcagacaaaacaagcaatcatcgatttattgggcggactcaaaaacgatgacgtgtccaaagactgggatctagcaacactcgtagcgagcgcatccatcatcctccaagaccgatacaaccaggcagccaaagactacgtaaacaacatcgcatccaaagaaaacaccatcgtcatcaacaaaatcaacaatgcaaccagcaagacacagctagccgaccttctcaaacagtacaaaaagaccatcacttgtaacagtgacgtgtcagaggctttccgcagcaaacgaaacagcctcacccgataaaaccgacacaaaccaacaaaacagtaaaggaaacaacaatgggactcgccaactaccgcaacagcaacagcagcaccttcttcaacccctcccgaaaccaggacgccaccgccatcgccttcaaagtccacgacgtcgaacacaacaccgaaggctacggtgggcagaccgcagaccgcatctacgctgatgtcaccatcttccacactctagacgatctcaacaacggcaccccagaaaccatccccaacgctattattgagaaagcacgcggcaacaacgaccgcccacactccatgatccgcgacctagaggcataccttggcgaggagcaggccttcaaactcgccaccgtacgcaccaaaaacggcttcaacggggtcgtgctcaaaccattacacgacgccatctatgataaggttgccgaatatgtagacaagcgcgataacggccagctagacgacaccacagcctcaactgatgctgatatcgacatcgactccatctgaccaccaatacaaccaacagacagatagataaaggtccctatgctctctctacaacgatccttcgagagagcctcccaaaccgcagccgaactgccccgcgtaccacaactagaacccctctaccgcaacctggacatgcacatccacaaaggggatctggtgatgattgcggggcgctccggcagccaaaaatcagggctagccatgttcatcacagcaatgctcaaccagcccaccctctacatatccggggacatgacaccctgggaggcctccacacgaatcatctcactcaacacccaacacacaaccgccgaaatacaacacaacatcgacgactacgggccagaatactatcgagacaccatccggcacggcgaacgcatcacattctcattccagtcacccatcacctggacagacatcaccatggaattacaagcctacatggaaatgtggaaccacttcccccccatcatcgtcatcgacaacctgatggacattcaagactgcgaatccgactaccaggcccagcaagaagccatgcaatggatcacagcattaggcagggatactggctccaccattattgtcacccaccacgcaaccgacaaaaccggctccgacatagaacaccccccggctaggcgggagatcaaaaacggcctctcagaaaaaccacaactcatattgggagtctcactttatggtggcgaagataacggcaacgggctcaccatccccgccgaggcacgcatcgctgtgctaaaacagcgcaccgggcgatccagcccagaaggcacccgatacgaaagactcagagcctaccccgaatacacattcttcgggcccctcgccgaaaaacagccctggaacatgaccacaacacacaaaggactatgatggctacacaacaggcacgcaaccggcgggccggagccgaatgggaaaccagacccctccaccagctacgcgacaccggctatgatatagaacgactccatctcaacggccgcgaagacgaaggcgacctcatcctcaaaaccaaaaaccacacatacgtgatcgaagccaaggcgggccaaccccacctcgccgacttcgtgaaacaagccagccgggaggcacgcaactacgaaacacaccgaaacaaacacaacaattccaccatcggactcgtcgtcatgaaacagcgcaacaaaccctggagcgaagcctatgtggtatcaaccctcaacgagctcctcccacacctctgacacccgccgcctcctcgaccactaccagatacgctacaacccgtccaaaaacgagcaacacatcctctgcccgttccacgacgaccaccagccctccatgagcatcaacctcgacaagggcgtctggtactgccacacatgcggtatcggaggcggactccacaagctacaacaacgactagagaaagaaaacccgaatgtacgacagcatacgcccctacaacattgcggaacgccgccgaatccagaaagcctcggccctctacgaaacccacctcgaaaacatactcgacctcctctcggcaagaggcatcagcgaagaaacagcccgctaccaccaccttggatacatcgacaatgaccccatcccaggccacgaaaactacaaccagtgcatcaccatcccatacatgtaccccgtttggggcggcccagccgaaatacgaaaaatgcgtttccgctgctcactcccgcacgactgcaaaacccacagccaccccaaatacttaaccccggcaggggacacaggctccatctacaacatggccgccatggccaacccggcagccgaaatgcacatttgcgaaggcgaattcgactccatgagcctcgaacaatgcggatggccagccgtcgccatacccggggccacctcgtggcaaactttttggaccaaattcttcgaaggctacgaccacatctacatctggtcagacccagaccccgcgggagacgagatggcccaaaccctaacccaagcattaccgcaagccacccatgtgcccctcactgtcggggatgtcacagacacctaccttcaggccggaaaaacagggttgacacaagcactagacactgtgctacagtaaaaccacgtaagcaacccaaaccaagaaaggtacaccaaaacatcatggatcccctcgacacgtgccccatcccccaccgccgcaacaccagccaaacagccaggaggcgtatccgcctcgccatctgtgcagaaaaatgggctgatggcgaagaccccacctacatcatgcgcacctggggcaccacctatgatgggatgcgatccatgatccgcgccaaccccgacattaaactacccgacgacatggccaaacggttacacaaaatctgccgggaagcctaccccaaaaaccagccaaacaggcaccgaagcggatgggacgcctacgagaaaaactactacacccacgaaatcctgttcctcgaccagttcaacatcccagccctcgaaatcctcaaccggctcgacgtgtcatgggccatgtggaaacaaatcatcaccgaaaaccatctcacccggctacaagacgaaacctacaatgcgtgccactggtattatctgaaacagcaacatccagactggaccgaccagcaaatcacacaagcccaacacgccgggaacaacaccttcaaccagttcatgcaagacgaccagccggtactatcgtgagcatctcgttcaaacccaccaccaaagacaagcgagctatacgcaacattattgtcgacgagtggctcgacgaaaaccaagtacgagacattcccgataatgcgctggagcgcattatcgaatactgctgggacgccttcacagccagcaaccggtacgccgtcgcagcgcaatactggcgaggccaaaatccacccgacagtgaacatcagcgcatactagtcggctactacaaaaccgttaaacaagccacgaacgcggccaaacaattccactggaacacccggctacaacaacaatggaaaacatggatactcccagtccacaacggcaccgtatcagagcatttcaccaaccagaaaacactcttcgacacaccaaccagcaaccagggtgacgccgcactgccggagcatctacaaaacgtcatgtgcggcaaaacactcaaccacacagacggaaccgtatcgtggtgcacacgcaaaccaggacacgacggcgactgccgcacaggatggcagcccaccacacaaccgatgggacatcatggcaaccaaaactgaaaccctcatccaacgctacggggctaaggctgcagacgtcctcgccgacagatccatccccgcatcctggctagcaaaacagctcacccaggcaggataccccatctccgccactgttattaaagactatcgccacaaacaagccaacaccaccccgcaagaggagaatatccgatgatagacaatattgaccggctactcacccagctagccaaccacgacaacgccatcgacaccatcgacgacaatctcgccaatggcaccgtacggcgcacacgcatctccgaatggaccttaccgaacggagaaaccggccgatccatacaaaaaatcatcgaccaccaacccgcaaccgacccctacccgatcgacgaactcgtcaacaaactagccgaatggaaaccccccaaaccagaaaccaacacccacagcaatgacgagaccgcgttcgtggtcggggcaggcgacttccaaatcggcaaaggcatcccccaaggtgaaaccgcacacttcgcagacgactacctacactcactcaccgccgccaaacactactggcaacaagccggacagccgcaacgagtccacatcgccttcctcggcgacatgatcgaaggatacgtgtcacaaggaggcaacaacgcctggcgcacacaaacacccttgacggaacaaatcaggctcacccgcatggccatgatgcaactcatccacatgttcgaccactgccccaacgtcaccatcacctccatccccggcaaccacggagaagccgtgcgcttcggcaaaggagtcaccacctacgacgactccttcgacgtggactgctgccgcgccatcgcagaagcctaccagctcaacaaccaataccccaacctacacttccacttccccagccgagacgaaatgaccaccacagtcgacgtggccggcacacaaatcctgcacgcccacgggcaccaatggcgcaccggcaaacaatacgaatggtggcgcggacaagagttccacaacggcaccacatcccacatcctcatggtcgggcaccggcaccacctcgaaatctccgagcaaggacaacgcaccttcatccaatgcccatccatggaaggcgaatccacatggtaccggcaccgcacaggcaccaccggccaccccggactcgtgtgctacactataaacaacaaaacaccaaacaactatcagatagcgagatgaaatagtgccatgagcagacgaccaacaaaagcggacctggccaccacagcatcgtgggtgtgggccacagaccatcatcttcgcacactcaaccgggcatgcaccaaaatagccggacactaccccgcaatcagtgcagacgacctgtaccaagactccctactatatattgcggtacgtgaacaataccacaacctagacaacaaacactacaccaaaatgtgttacagggtagccaaacggctagccaacaaaaccatacaacacctagaccaaccgaaacctttatccgatattattcatctagccgaccaccagacaagcatctaaaggagaaccccaattatggttaccacaacactagacgacggaacccaaaccaccgtcctccaaaccgtaggcgccaccgccacagcaatcatcaccaacacagaaaaccccgaaaccatcaccgccaaatacactattagcaaagacggcacagccacctacagcatcagcggaaacacctaccttggcgaccaccaacacattattaaactcatgtacgactactgccactgcgtcggacgattcgacaccaccaacaccagcaacccagacaacctcgacaacctattcaggggatgacacatgaaccgaacctacaccaccgccgacatcatccaagccgcccaatggatctggaacggaggcccatggaaacccagtgttgaaccaggaatgccacccccaccaaccgcgccacaacatcacggcaacaacattgccaccatgatcgatttacagctagccatcgacgactacaccctcacctgtgaaccatccaaacagaggaaacatttggcacgcctggcagccttcagggaagtatacgggtatgatcaaacctatgccacagccgctcagcgactcggagtcacccggcagacagcgaaacagtgggcagaccaaacactgatgacgttcaccgagtacgcaaacagcacatactacatgccagacgataacgaaggaatggcataaaaaccatggacaacacaaccaacatcctctacaccgccctcaaaacggcggtacaccgaatcatccaacaacagcccaccaacatgcaacagctagaaaacattattggcggtgtcgaaaaccagtaccgtgtaccaatctcactcgacaacgtgaaccttaccgtcaaagaagtcagcctcgacgaccttgctatcgaccaggacacgctagacgagtgcagcgaaatcttgtggtgctgcgacagtgcaggacacccaaacaacagcaacacccgtggcaagagcgaggaccagagcccctatgcaagccaggaggcgctagactggctcgccggaatcgcataccaggccaaactactacaatcggcagccgacgagatcatgtgggctatcatccgccaccgcgacaaccacaaaaatgttatcggccggaacgttctagaccaggccagcgaaactatctctacctgcctccacctgtatcagatgctcgaagacaccatcgacagcaacgaatcatagccacaccgcatatacagaaatagtgccccagcggcaaccaccacacgatcgtggcagcaccgctggggcacacatctatattcacttatgcaacagtagactctaccgtgccaacctcagactcggcagcacgccgaggctcatagcctacaccaagatccgcatcatctacaggctcaatcatgcccggatccgacacatccaccgagtgcggctcaaccaagcccccgtcatcaggtggaacaagcccagcatccacaacaggcgtcaccttcggcttaccggccacaaacgacgggctaccaaacgaggtagcaaccgacaacaccgcagcaaccgttgctgtgatcagggcagactcccacggcaaaccacgaaacgactccgcagtataagtaacacccgcagtcacccccaacacagcaacaaacgtttgcacaaaagtcttagccgcccgctccagtaaacctaaccaaaactgtttacccacaacaaaccaccatcactttttcaaaccgttaacagcagactcaagcctgtcaatacggctacgacactccagcacgtaataccagacactccacagggcatccttggtgcgccacagtttccccgtcaccggattcttcacccacgacaaggcctccacgcggcgcgccaggtcaccattctgaacctgaaccacaccaacatcatgatgcagcttattcaccgaaccagtaagctgagcagacaattgtttaatctgatcatgcaaggcttacacatcagccacagttaactccccactatctccactgccgccgttgacgacggccataaacctgtcccacggaaaccacggccccggatcgtcatgatccgactgatgccacgcatccgtaacatccacatgcccgcaaacaccccgcctaccagccttcaaatcggctgcactaagcttccttttcggaccattatatttgtcacacaactgccggcacagcaccgccgccctttccacggcaggccacaccctcggatcaagccactgctccctcgtgtaagcatgccccggcacccgaaacgaggcatgcgatcccccatccgcgcaaatctatatacccaaactatgcggattcggcggggcatgccagccaatcgtagactccgacaagcactgcaccgtctccccaatatcgcgcacataatgcgccgaaccacccgacgatggggacgcgaaatagtttgctgtggacacagcccgacctttacgcgaggcggacggaaaccccacatccgggcatgtcgcatgaatcacaaccctatacaccggactattcgagccggcagaatgatgcgccgcaggaataaacctcacaacatgtcaccaccaaacactaccatcacagccactcctttctatttgtgggatgatatagtcactataggcgacggtttcacaccctggcaggccaccgaacccgatattgtagaagccacaccgtcactatatttcacaaccaggcggccctcagaacagtacacagacaccaccgagcgcccatccttgccgtccttaccattcttaccatcggatccgttcgcaccggcggggccgcgctcaccacgttcaccctgtgcaccttgcgggccggcaggacctgaagggcccacatcaccgcgctcaccagccgaaccatcccgaccatcagcgccatcaactccattcgcaccgtcagcacctgcacggcccggaacaccatcatggccatctgatccattcgcgccaggcagcccgtcaggacctttcacaccattcaaacccggggaaccctgcggacccacagggccaaccagcccagtcgaactgttaacaccatcccggccgtcaacacctgcagggccttgcgggccacgcacaccagccggaccaggcacaccctgcacactccgctccgtgcgggcagcatccacacacaaaccagaacggtgaagcttaacagactccacgccaccctgcgcacacacctgccgcacacggcttgctaaacccttagccgctgtaccattagactgggccctcgcctgctcc

SEQ ID NO: 24 - DNA, 15274 bp, Pahexavirus sp.
  source 1..15274: mol_type = genomic DNA
gagttaaggctattgttggtgatttctcgcgtgttaattggggtttccagcgtaacttcacgattgagctgatcgagaatggcgatccggatcagactgggcgtgacctgaagggccaaaatgaggttatggttcgtgccgaggctgtgctgtatgttgcgattgagtcgcttgattcgtttgccgtggtgaaggagaaggctgccccgaagcctaatcctccggctggtaactgattcatttgttgcgataatgtttatgctgtgtgcagggggtggtgttgatgggtatcattttgaagcctgaggatattgagcctttcgccgatattcctagagagaagcttgaggcgatgattgccgatgtggaggctgtggctgtcagtgtcgccccctgtatcgctaaaccggatttcaaatataaggatgccgctaaggctattctgcgcatggctttgttgcgctggaatgatactggcgtgtcggggcaggtgcagtatgagtctgcgggtcctttcgctcagactacacggtctagtactcccacgaatttgttgtggccttctgagatcgccgcgttgaagaagctgtgtgagggtgatggtggggctggtaaagcgttcactatcaccccaactattaatggtcgatatgcacattctgaggtgtgttccacggtgtggggtgagggttgctcgtgcgggtcgaatattaacggctacgctggccctttgtgggagatatgatatgaccagttttccttatggtgaaacggttgtgatgcttcaaccgactgttcgtgtcgatgatcttggtgacaaggttgaggattggtctaagcctgtcgagactgtgtttcatcatgtggccgtttatgcttctgtttcgcaggaggatgaggccgcggggcgtgactcggattatgagcattggtcgatgcttttcaagcagcctgtcaagggtgccggttatcgttgcaggtggcgtattcggggtgttgtgtgggaggctgacgggtctcctatggtgtggcatcatccgatgtctggctgggatgctggtacgcagattcatgtgaagcgtaagaagggctgatcggttgtggctcaggatgtgaatgtgaagctgaacttgtcgggtattcgtgaggtgttgaagtctcctggtgtgcagggcatgttggctgagcgtggcgagcgggttaggcgtgccgcatcggcgaatgtgggcggtaatgcttacgatagggcccagtaccgtggcggattatcgtctgaggtgcaggttcaccgtgttgaggctgtcgccaggattggcaccacctataagggtgggaagcgtattgaggcgaagcatggcacgttggcgaggtcgattggggctgcgtcgtgatcgtttacggtgatccgcgtgtgtgggctaaacgcgtgctcaaggatgatggctggctgtctgggataccttgtactgggacagtaccggatagttttgagggtgaccttatttggttggctcttgatggtggcccacagttgcatgttcgcgagcaggtgtttttgcgcgtgaatgttttctcggatacgcctgatcgtgctatgagcctgtcgaggcgtgttgaggctgtccttgttgacggggttgatggtgatcctgtggtgtactgtaaacggtctactggtcctgatttgctggttgatggtgcacgttttgatgtgtattcgctttttgagctgatatgtaggcctcccgaatccgagtaagcgtatcgttgtttttgttttaatgtaattgtttgatattgtttttgggggttatgatggctgcaacacgtaaagcgtctaatgttcgctctgctgttacgggtgacgtctatattggtaaagctcatgccggtgacactattgatggtgtgaagacggttcctgacggtcttaccgctttagggtatctgtcggatgacgggtttaagattaagcctgagcgtaaaacggatgatttgaaggcttggcagaatgcggatgttgttcgcactgtggccaccgagtcttctatcgagatttcttttcagctgatcgagtctaagaaggaggttatcggactgttttggcagtcgaatgttactgccggagccgattcgggttcgttcgatatttctccgggtgccacgacgggtgttcatgccctgttgatggatattgtggatggcgatcaggttattcgctactatttccctgaggttgagcttgtcgatcgtgacgagattaagggtaagaatggcgaggtgtacgggtatggtgtgacgttgaaggcttaccctgctcagattaataagactggtaatgcggtgtctggtcgggggtggatgacggctttaaaagctgatactcctccggttccgccttctccggccccggttcctccgaagcctgagccggatcctaatcctccgtccgagaactgatacacgattttagggattgttgatagatgagtgacacaggttacacattaaagatcggtgaccgtagctgggtgttggcggatgcggaggagacggcgcaggctcttcctgcccgtgtgtttcgccgtgccgccaggattgcccagtcgggggagtctgcggatttcgcccaggttgaggtgatgttttctatgttggaggctgccgccccagctgacgcggtggaggccctggaggggcttcctatggttcgtgttgccgagattttccgtcaatggatggaatacaagcctgatcagaaagcggcctccctgggggaatagtttggctccacggcctgattgatgattatcgtggggccatcgaatacgatttccgcaccaagtttggtgtttctgtttatagtgttggtggcccgataatgtgttggggtgacgctgtccggctggctggcgtgttgtgtaccgatacgtctagccagttggcggcccacctgaatggttggcagcgcccgtttgagtggtgcgagtgggcggtgttggacatgttggatcattacaggtctgctaatagtgaggggcagccggagcctgtggcgaggcctacggatgagcgtagggcccggtttacgtctgggcaggtggacgatattttggcgcgtgttcgtgccggtggcggggtgtctcgcgagattaatattatggggcgaatagtgtatgtctggtgagattgcttccgcatatgtgtcgttgtatacgaagatgcctggtttgaaggcggatgttggtaaacagctttctggggtgatgcctgcggagggtcagcgttcgggtagcttgtttgctaagggcatgaagttggctcttggtggtgccgcaatggtgggtgctatcaatgttgctaagaagggcctcaagtcgatttatgatgtgactattggtggcggtatagctagggcgatggctattgatgaggctcaggctaaactgactggtttgggtcacacgtcgtctgacacgtcttcgattatgaattcggctattgaggctgtgactggcacgtcgtatgcgttgggtgatgcggcgtctacggctgccgcgttgtctgcttctggtgtcaagtctggcgggcagatgacggatgtgttgaagactgtcgcggatgtgtcttatatttctggcaagtcgtttcaggatacgggcgctatttttacgtcggttatggctcgcggtaagttgcagggcgatgacatgttgcagcttacgatggcgggtgttcctgtgctgtctttgcttgccaggcagacgggtaaaacctcggctgaggtgtcgcagatggtgtcgaaggggcagattgattttgccacgtttgcggctgcgatgaagcttggcatgggtggtgctgcgcaggcgtctggtaagacgtttgagggcgctatgaagaatgttaagggtgcccggggttatcttggtgctacggctatggcgccgtttcttaatgggttgcggcagatttttgttgcgttgaatccggttatcaagtcggtgacggattctgtgaagccgatgtttgcgtcggttgatcaggggattcagcgggtgatgccgtctattttggcgtggattaaacgcatgccgggcatgatcactcgaatgaatgcacagatgcgcgccaaggtggagcagttgaagggcatttttgcgagaatgcatttgcctgtccctaaagtgaatttggctgccatgtttgctggcggctccgcagtgtttggtattgtggctgccggtgtggggaagcttgttgcgggttttgccccgttggcggtgtcgttgaagaatctgttgccgtcgtttggtgctttgaagggtgccgctggcgggcttggcggcgtgtttcgcgccctgggtggccctgtcggtattgttatcgggctgtttgctgccatgtttgctacgaacgcccagttccgtgccgcggtgatgcagcttgttggtgtggttggccaggctttggggcagattatggccgccttgcagcctgtgttcgggattgttgctggtttggtggcacggttggcgccagtgttcggccagattattggcatggttgccgggctggttgcccagttgatgcctgtgattggtatgctggtggcccggctggtgcctgtgatcacgcagattattggcatggtgacgcaggttgcggccatgttgctgcctacgttgatgccggttattcaggctgttgctgctgtgatacgtcaggttgttggtgttgtgtcgcagctggtgccggtgttgatgcctgtgattcagcagattttgggtgctgtgatgtctgtgctgccaccgattattggtttgatccggtcgttgatgccggtgatcatgtctgttatgcgtgtggtggtgcaggttgtttcggttgtgttgcaggtggtggcccacattattccggttgtgatgccgattgtaacagctgtgatcgggtttgttgcacgtattcttggcgctattgtgtctgctgcagcccgcattattggggctgtcacccgtgtcatctcatgggttgtgaatcatttagtgtctggcgtaaggtctatgggcacggccatcttgaatggctggaatcatattagagcgtttacgtcagcgtttattaacggtttcaagtcgattgtttctggcggtgtgaacgcggttgtggggttttttgcccggcttggttcttcggttgcttctcatgtgaggtctggttttaacgcggctcgtggtgctgtttcttctgcgatgaatgctatccggagtgttgtgtcttcggtggcatctgctgttggcgggtttttcagttcgatggcgtctagggttcggaatggtgctgtgcgcgggttcaatggtgcccggagtgctgcttctagtgctatgcatgctatggggtctgctgtgtctagtggtgtgcatagtgtgataggttttttccggaatctgcccagcaatattaggggcgctttgggtaacatggggtccctgttggtgtcggctggccgtgatgtggtgtctggtttgggtaatggtatccggaatgctatgagtggcctgttggatacggtgcgtaatatgggttcccagattgcgggtgctgcgaagtctgtgttgggtattcattccccgtctcgggtgtttcgtgatcaggttggccgtcaggttgttgccggtttggctgaggggatcaccggtaatgctggtttggcgttggatgcgatgtcgggtgttgcttcgcagcttccggatgctgttgatgcccggtttggtgggcgatcgtctgtgggctcgtttaccccgtatgaccggtatcggcgtgagaatgataagagtgttgtggtgaatgtgaatggacccacgtatggtgatcctgccgagtttgcgaagcggattgagcggcagcagcgtgacgcttggaacgcgttggcttatatgtgagtaaaggggtatgcatgtttattcctgacccgtctgatcgttctggtttgactgtgacgtggtttatggatccgctgtttggtggggagcgtgtgcttcatttgacggattatacgggtgcgtctcctgtcatgttgttgaatgattcgttgcgcggtttgggtgttcctgaggtggagcatttttcccaaactcatgttggggtgcacggctcggagtggcgcgggtttaatgtgaagcctcgcgaggtgacgctgccggtgttggtgtcgggtgttgacccggatccggtgggcgggtttcgtgacggttttttgaaagcctatgacgcgttgtggtctgcttttcctcctggcgaggagggggagttgtcggtgaagacccctgccggtgttgagcgtgtgttgaagtgtcggtttgattcggctgatgacacgtttacggtggatccggtgaatcgtggctatgcgcgctatctgttgcatttgacagcttatgacccgttttggtatggggatgagcagaagtttcgttttagtaacgcgaagttgcaggattggttgggtggcggcccggtcggcaaggatggcacggcgtttcctgtggtgttaacaccgggtgttggttcgggttgggataatttgtcgaataagggtgatgtgcctgcgtggcctgtgattcgtgttgagggcccgttggagtcgtggtctgtgcagattgatggtttgcgtgtgtcttcggactatccggtggaggagggtgagtggatcactattgatacggatcctcggcagcagtctgcgctactggatgggtttgaggatgtgatggatcgcctgtctgagtgggagtttgcgccgattcctccgggtggttcgaagagtgtgagtattgagatggttggtttgggtgccattgtggtgtcggtgcagtacaggtttttgagggcttggtgagtggttgatggctggtcttgttccgcaggtaacattgtttacaccggattatcgccgggtggcgcctatcaatttttttgagtcgttgaaactgtcgttgaagtggaatggtttgtcgacgttggagttggtggtgtcgggtgatcattcgaggcttgacgggttgacttggcctggggcgcggctggttgttgattatggtggtggccagattttttcggggcctgtgcgtcgggttcatggtgtgggcccgtggcgttcttcgcgggtgactatcacgtgtgaggatgatattcgcctgttgtggcgtatgctgatgtggcctgtgaattatcgccctggtatggttggtatggagtggcgtgccgacagggattatgcccactattcgggtgcggctgagtcggttgctaagcaggtgttgggggataatgcttggcgttttccgcccggtttgtttatgaccgatgatgagagtcgtggccgctatattaaggattttcaggtgcggttccacgtgtttgccgataagttgttgccggtgttgtcgtgggctcggatgactgtcacggtgaaccagtttgagaatgcgaagtttgatcagcggggtttgctgtttgattgcgtgcctgccgtgacccgtagtcacgtgttgactgccgagtctggttcgattgtgtcgtgggagtatgtgcgtgacgccccgaaggcgacttcggtggttgttggtggccgcggtgagggcacggatcggctgttttgtgaggatgttgattcgatggccgagggggattggtgggatcgggttgaggtgtttaaggatgcccgtaacactgattctgagaaggtgtctctcttcgatgaggctgagcgggtgttgggggagttgcaggcttcgtcggggtttaagatcgagttggcggagtcggatgtgttgcggtttgggccaggcaatctgatgccgggtgatcttatctatgtggatgtgggctcggggcctattgcggagattgttcggcagattgatgtggagtgtgattcgcctggtgacgggtggacgaaggtgactcctattgcgggggattatgaggataatccgtctgcattgttggctcgccgtgttgccggtttggctgccggtgtgcgggatttgcaaaaattctaattgttaggggtttgttgtgggtattgtgtgcaagggttttgatggtgtgttgaccgagtttgattgggctcaaatgtctggtttgatgggtaatatgccgtctgtgaaagggccggacgattttcgcgtcgacactactgttcaaggtaacacggtgttgtgtacggttttgccggggcaggcttgggcccacggggtgatgtgcacgtcgaatagtgttgagacggtgacggggcagcttccgggccctggtgagacccgatacgactatgtggtgttgtctcgggattgggagcagaatacggccaagttggagattgttccgggtgggcgtgctgagcgtgcccgtgatgtgttgcgtgcggagcctggcgtgttccatcagcaactgttggcgacactggtgttgtcgtctaacgggttgcagcagcagctggataggcgtgctgtggcggctcgtgtggcgtttggtgagtctgcagcctgtgatcctaccccaatggagggtgaccgtgtgatggttccttcgggggctgtgtgggctaaccatgtcaatgagtggatgttgttgtctccgcggatcgagacgggttcgaagcagatccagtttggcgggtctgctgtgtatgcttacacgatcccgtttgcccgcccgtttggtagtgcgcctgttgtggtggcgtctatggcgacggcggctgggggcacgcagcagattgatgtgaaagcctacaatattactagcaaggattttcagttggcgtttattacgaatgacgggtctaagccgaaggatgtgcctgcggtggctaattggattgctgtcggcgtgtaatgtgcggcttgcgggtatgtgacgtgttgtggtggttgtagtggtagggggctgtagtgtcatggcttacacccacacttgtagcctctctttgtaccgctatcgctactgttcttggttcgattcaggcggctacgtacaggtcgaagaagaggctgaggcagttgtctgcgcaggtcgatgcgatggatgaatacacgtggaatattcgccatattgttcaccgctataacgcgaatttgccggagaatgttgagccggtaaagatgcctgatttgcccgagtttttgaaagatactgttgatggtggaggtgagtagggttgagggagttggaggaagaaaaaaggcagcgccgcaattttgagaaggcttcactggtgttgttgtttttgtcgcttgtgctgttggcggtggttgctgcgggtgctttgcggtacgggtctgtggcttcgcaaagggattcggagcaggcgagggcccagtctaatggtacagccgccaagggtttggctgcccgtgcgcggcaggtgtgtacccagggtggcgtggagtctgcgcggcttcaccggtctggcttgtgtgtggatgctcagcgtgttgagcggagtgtgcagggtgtgccgggtcctgccggtgtgcgcggcccgcaaggccctgcaggtgctgatggccgggatggtgttaatggttcggctgggctggttggccctgttggtccgcagggttccccgggtttgaatggtgtgaaaggtcctgacgggttgcctggcgctaacggttcggatggccgtgacggtgttgccggtgttaacggttcggatggccgggatggtgtgcctggtagggatggcgccgatggggctgatggtggccgtggccctgccggcccccctggtgttgccggtgcacagggtgaacagggtgagcgtggccctgttgggcctcagggtccgcagggttctgccggtgccgatggcacgaatggtaaggatggcaaggatgggcgctctgtggtgtctgtgtactgttccggtggccgcctggttgtgaaatatagtgacggtacggcctctaccatatcgggctcggtggcctgtgagagtgtgaaaccgtcacctgtggttaccgtatcatcccgtagatgaaaaaataggggaaaggtgttgctgtgatgttagtggtgtttgggggtggcgtgttgtgagatacattcctgcggcgcatcactcggccggatcaaatagtccggtgaaccgtgttgtgattcacgcgacatgcccggatgtggggtttccgtccgcgtcccgtaaagggcgtgcggtgtccacggcaaactattttgcttccccatcggcgggtggttctgcgcattatgtgtgtgatattggggagacagtgcagtgcctgtcagaggggactattggttggcatgccccgccgaatccgcatagtttgggtatagagatttgcgcggatgggggttcgcacgcctcgttccgggtgccggggcatgcttacacgagggagcagtggctggattctagggtgtggcctgcggtggagaaggctgccatcctgtgtagacgtttgtgtgacaaatataatattccgaaaaggaaactgtctgtggccgatttgaaggccggtaaacgtggtgtttgcgggcatgtggatgtgacggatgcgtggcatcagtcggatcatgacgatcctgggccgtggtttccgtgggacaaatttatggccgtagtcaacggcaaagatgagagtggggagttaactgtggctgatgtgaaagccttgcatgatcagattaaacaattgtctgctcagcttactggttcggtgaataagctgcatcacgatgttggtgtggtacaggtacagaatggcgatttgggtagacgtgttgatgccctatcgtgggtgaagaatccggtgacggggaagctgtggcgcacaaaagacgctttgtggagtgtctggtattacgtgctggagtgtcgcagccgtattgacaggctcgagtctgctgttaacggtttgaaaaagtgatggtggtttgttgtgggtaaacagttttggttaggtttactggagcgggcggctaagacttttgtgcaaacgtttgttgctgtgttgggggtgacggcgggtgtcacgtatacggcggagtcgtttcgcggtttgccgtgggagtctgccctgataacagctacggtggctgcaatactgtcggttgctacctcgtttggtagcccagcatttgtggccggcaagcctaaaaccacggttgtggatgcgggtttggttccaccggatgatgggggcttggttgagccgcactcggtggatgtgtcggatcctggcatgattgagccgacagatgatgcggatcctggtgtaggctatgtgccgaaacacgctgccgagtcggaggttgggacggtagagtctactgttgcataagtgaatatagatgtgtgccccagcggtgctgccacgattgtgtggtggttgccgctggggcactatttttgtatattgcggtgtggctatgattcgttgctgtcgatggtgtcttcgagcatctgatacaggtggaggcaggtagagatcgtttcgctggcctggtcgagaacgttccggccgataacgtttttgtggttgtcgcggtggcggatgatagcccacatgatctcgtcggctgccgcctgtaatagtttggcctggtatgcgattccggcgagccagtctagtgcttcctggcttgcataggggctctggtcctcgctgttgtcacgggtgttgctgttgtttgtggggtgtcctgcactgtcgcataaccacaggatttcgctgcactcgtctagcgtgtcctggtcgatagcgagatcgtcgaggctgacttcgttgacagtaaggttcacgttgtcgagggagatgggtacaccgtactggttttcgacactgtcaacaatgttttccagctgttgcatgttggtgggctgttgttggacgatacggtgtatcgctgtgttgagggtggtgtaggtgatattgtgtgtgttgttcatggttttatcccatccttgtgctttcgtccttttcgtctggatagtatctactgtttgcgtagcctgtgagggtgatcagtgtctggtctgcccactgtttcacggtttgtcttgtcactccgagtcgttgggcggccgacgcatatgtttggtcatatccatagacttcccggaatgcggctagtcgggcgaagtgttttcgctgtttggacggctggcaggtgagggtgtagtcgtcgatggctagctgtagatcgatcatggagacgatgttgttgccgtggtgttgtggcgcggttggtgggggtggcatgcccggctctacactcggtttccatgggcctccgttccagatccattgggcggcttggatgatgtcggcggtggtgtaggttcggctcactggtcatcccctgaataggttgtcgaggttgtctgggttgctggtgttactggtgtcgaatcgtccgacgcagtggcagtagtcgtacatgagtttgataatgtgttggtggtctcccaaataggtgtttccgctgatgctgtaggtggctgtgccgtctttactgatggtgtatttggcggtgatggtttcgggtgtttctgtgttggtgatgatggcggtggtggtggcgcctactgtttgtagcctggtggtttgggtgccgtcgtcgaggatggtggtaaccatgatgattctccttagttgctggtttggttgtcggctatggctgtgatttcttgtaccggtttgggtaggtctaggtggtggactgttttgtttgctagtcgttgggctaccctgtagcacattttggtgtagtgtttgttgtctaggttgtggtattgttcccgcaccgcaatatatagcaaagagtcttgatagcggtcgtctgcacggattgcggggtagtgtgcggctgttttggtgcatgcccggttgagtgtgcgtagatgatggtctgtggcccacacccacgatgcggtggtggctaggtctgcttttgttggtcgtctgctcatggcatctctttcatctggctatctggtagttgtttggtgttttgttgttgatagtgtcgcacacgagtccggggtttccggtggtgcccgtcttgtgccggaaccatgtggattcgccttccatggatgggcattggatgaaggtgcgttgtccttgttcggagatttctaggtggtgtcggtgcccggccatgaggatgtgggatacggtgccgttgtggaattcttggccgcgccaccattcgtagtgttggttgttgcgccattggtgtccgtgtgcgtggaggatccgtgttccggccacgtcaacggtggtggtcatttcgtcgcgttcggggaaataaaagtggaggttggggtattggttggtgagttggtaggcttctgcgatggcgcggcagcagtctacgtcgaaggagtcgtcgtaggtggtgactcctttgccgaagcgtactgcttctccgtggttgccggggatggaggtgatggtgacgttggggcagtggtcgaacatgtggatgagttgcatcatggccatgcgggtgagcctgatttgttcggtgaggggtgtttgggtgcgccaggcgttgttgccgccttgtgacacgtatccttcgatcatgtcgccgaggaaggcgatgtggactcgttgcggtctgcctgcttgttgccagtagtgttttgcgacgatgagggtgtgtaggtagttgtcggcgaagtgtgctgtttctccgccggggatgcctttgccgatttggaagtctcctgccccgatgacgaaggctgcagtgctgtagtcggtgcgggtgtcttggtcgggttttggtggctgccattcggctagtttgttgacgagttcatctacaggatatgggtctgttgcgggttggtggtcgatgattttttgtacggatcggcctgtttctccgttggggagtgtccattcggagatgcgtgtgcggcgtacagtaccattggtgagatcatcattaatggtgtcgagggcgttgtcgtggttggctagctaggtgaggagccggtctatattgtctatcactggttttcctcttctgtttgtggggtggtgttggcttgtttgcggcggtagtctttaataacggtggcggagatggggtatccggctttagtgagcatttgggctagctgtgtggcggggatggttttgtcggcgaggacgtctgcggctttatcaccgtagcgttggatgagggtttcagttttggttgccatgatgtcctaggggttgtgtggtgggttgccatcctgtgcggcagtcgccgtcgtgtcctggtttgcgggtgcaccatgatacgttgccggcattgtggatgatggcacggccgcatatgacgtcttgtaggtgttcgggaaatttatcgttgttgttgtccctgtttgtgtcggtcacgtgtggggttgtggtgaccatcatgtctcctatgtgtgaaagagtgtgcaaatatgatgctggtgtcatggatgtttatgcgggtatggttttcatcaccttgctgaacgttacttggttactgtacatcatctgggtgattccctgatccgttttgtcggggtgctgttttcgcaggtttgcccattggcaggcgttgtcggtttcctgctgtaaacgtgtcaggtgttgttcgttgatgatgtgtttccacatggcccaggatacgtctagcctgtttaggatttcgatggctgggatgttgaaggagttgaggaagagtatttcctccgtgtagtagtctttttcgtattggttccatccgcttcggtgtctgttgggctggtttttggggtaggcttcccggcatactttgtgcaaacgtttggccatgtcgtcgggtagtttaatgtcggggttggcgcggatcatggatcgcatcccatcataggtggtgccccaggtgtgcatgatgtaggtggggtcttcgccatcagcccatttttctgcacagatggcgaggcggatgcgcctcctggctgtttggctggtgttgcgccggttgggtattgggcacgtgtcgaggggatccatgatgttttagtgtacctctctggtttcgtgttgttaacgtgttttactgtagcacagtgtctagtgcttgtgtcaaccctgtttttccggcctgcagataggtgtctgtgacatcccccagggtgaggggcacgcgggtggcttgggggagtgccgtctggagggtttgtgccatctggtcgcctgccgggtctgggtcggaccatatgtag

SEQ ID NO: 25 - DNA, 16873 bp, Pahexavirus sp.
  source 1..16873: mol_type = genomic DNA
gccctcggtggagggaaacgtatcgcgtggacggagttttcgattcctgacgagtctgatccggatgatgtgtcgcggcagtggcggaagcttgctggtgacactaatccggcgttggggcggcgtctgaatttcgggacggtaagcgatgagcatgagtcgatgtctgctgccgggtttgctcgggagcggcttggctggtgggatcgtggccagtctgctacgtctgtgattcctgcggataagtgggctcagtctgcggtggatgaggcgagtctggttggcgggaaagtgtttggtgtctcgttttctcgttctggggatcgggttgctttggcgggtgccggccggactgatgctggggttcttgttgaggttattgatgggctgtcgggaacgattgttgatggtgtgggccggttggctgactggttggcggttcgttggggtgatactgaccggatcatggttgccgggtctggtgcggtgttgttgcagaaggcgttgacggatcgtggtattccgggccgtggcgtggtggttgctgatactggcgtgtatgtggaggcgtgtcaggcgtttcttgagggtgttcgttcgggtgttgtttctcatcctcgtgctgattctcgccgtgacatgtgggatattgctgtgaggtcggctgtgcagaagcgtaaggggtctgcgtggggttggggttcctcgtttaaggatggttctgaggttcctttggaggctgtgtctttggcgtatcttggtgtgaagatggcgaaggctaggcggcgtgaacggtctggtaggaagcgggtgtctgtggtatgaactcggatgagttggctctgattgagggcatgtacgatcgtatccaaaggttgtcttcgtggcattgccgtattgagggctactatgagggttctagccgggtgcgtgatttgggggtggctattcctccggagttgcagcgtgtgcaaacggtggtgtcgtggcctggtatagctgtggatgctttggaggagcgtctggattggcttggctggacgaatggtgacggctacggtttggatggcgtgtatgctgcgaatcggcttgctacggcttcgtgtgatgtgcatttggatgcgctgatttttggtttgtcgtttgtggctgttatcccccaggatgatggtactgtactggttcgtcctcagtctccgaagaattgcacgggccggttttcggctgatggttctcgtctggatgctggccttgtggtgcagcagacgtgtgatcctgatgttgttgaggctgagttgttgttgcctgatgtaattgttcaggtggagcggcgtgggtctcgtgaatgggttgagacgggccgtatcgtgaatagtttgggcgtggtgcctttggtgcctattgtgaatcggcgccgtacttctaggattgatgggcgttcggagattacccggtctattcgtgcctatacggatgaggctgttcgtacgctgcttgggcagtctgtgaatcgtgatttttatgcgtatcctcagcgttgggtgacgggtgtttcggctgacgagttttcgcagcctggctgggtgttgtctatggcttctgtgtgggctgtggataaggatgatgatggggacactccgaatgtggggtcgtttccggttaattctcctactccgtattcggatcagatgcgcttattggctcagttgactgcgggtgaggctgctgttccggaacgctatttcgggtttatcacgtctaacccacctagtggggaggctttggctgccgaggaatctcggcttgtgaagcgtgctgagcggcgtcaaacgtcgtttggtcagggctggctgtcggttggtttcctggctgctaaggcgcttgattagagtgttgatgaggccgcgtttttcggtgatgtgggtttgaggtggcgtgatgcttcgacgccgactcgggcggctacggctgatgctgtgacgaagcttgttggtgccggtattcttccggccgatagccgtactgtgcttgagatgctggggcttgatgatgtgcaggttgaggctgtgatgcgtcatcgtgccgagtcttcggatccgttggctgcgctggctggggctatttcccgtcagacgaacgaggtttgataggtgatggcttcgggtgctgtgtcgaggcttgctgcgactgagtatcagcgtgaggcggtccggtttgctgggaaatatgcgggctattatgccgagcttggtcgtttgtggcatgccgggaagatgacagatgcgcagtatgtgcgtttgtgtgtggagttggagcgtgccggccatgatggttcggcatcgttagccgccaggtttgtgtcggattttcgccggttgaatggtgtggatccgggtttgatcgtgtatgacgagtttgatgctgccgccgcgttggctaggtcgttttcgactatgaagattcttaagagtgacccggatagggcgaatgacacgattggttcgatggctgcgggtgttaatcgggctgtcatgaatgctggccgtgacacggttgagtggtctgcgggtgcgcagggtaggtcgtggcgcagggtgactgatggtgatccgtgcgtgttttgtgccatgttggctacgaggtcggattatacgactcgggaaagggcgcttactactggtcatactcggcgtcataagcgtgccggtaagcgtccgtttggttcgaagtatcatgatcattgtgggtgtacggtggttgaggttgtggggcgttgggggccctcctctgcggacaccgcatatcagcgggtttatgagaaggctcgtgagtgggttgatgatcatgggttgcagcagtcgcctagcaatattttgaaggctatgcgtactgttggcaacatgagatgatggtttccggttgtgtgccgccggttatcggtgcacgtggttgtctcccgcacgggggtcaacaatgttgtgttgttttccgcaaggagtatagggttaggctatggccgatcaaaaagttgaagaacagaatgttgacaatgatgctgttgagcccggaaagggtggagacgttgttgatgttgtgaaggatgggcaggcttccggcgatgatcatgccggtgatgtttccgtgaaggaggagtcttcttctggcacggattggaaggctgaggcccgtaagtgggagtctcgtgctaaaagtaatttcgccgagttggagaagcttcgcgcctcggatggtgatgcggggtctgtgattgatgatcttagccgcaagaatgaggaactcgaagaccggatcaatgggtttgttcttgagggtgtgaagcgtgaggtggctgccgagtgtggcctgtcgggtgatgcgattgctttcttgcacggtggcgatcgtgaagcactggtggagtctgctaaggctttgaagggtttgatcgaccagagtagtggtggtggcgcgggtgtgcgccgacaagcggggagtgcccccgttgatgatgttaaacgacgtgagggtgtcgcgtttgtggatgctcttgtcaataattctaggagatgatttgtgatggctgacgattttctttctgcagggaagcttgagcttcctggttctatgattggtgcggttcgtgaccgtgctatcgattctggtgttttggcgaagctttcgccggagcagccgactatttttggcccagtgaagggtgccgtgttttcgggtgttcctcgcgccaagattgttggtgagggtgaggttaagccttcggctagtgttgatgtttcggcgtttactgcgcagcctattaaggttgtgactcagcagcgtgtctcggacgagtttatgtgggctgatgctgattaccgtctgggtgtgcttcaggatctgatttccccggctcttggtgcttcgattggtcgcgctgttgatctgattgctttccatggtgttgatccggctacgggtaagcctgctgcggctgtcaagtcttcgctggataagacgacgcatgttgttgatgccacggattctgctacgaccaatcttgttaaggctgtcggtcttatcgctggtgctggtttgcaggttcctaacggtgttgctttggatccggcgttctcgtttgctctgtctactgaggtgtatccgaaggggtctccgcttgccggtcagccgatgtatcctgccgccgggtttgctggtttggataattggcgtggattgaatgttggtgcttcttcgactgtttcgggtgccccggagatgtcgcctgcctctggtgttaaggctattgttggtgatttctcgcgtgttcattggggtttccagcgtaacttcccgatcgagcttatcgagtatggtgatccggatcagactgggcgtgacttgaagggccataatgaggttatggttcgtgccgaggctgtgctgtatgtggctatcgagtcgcttgattcgtttgctgtggtgaaggagaaggctgcaccgactcctcctccggctggtaactgatacaagataagcgaatgtgtactgtgtgcagggggtggtgttgatgggtatcattttgaagcctgaggatattgagcctttcgccgatattcctagagagaagcttgaggcgatgatcgctgatgtggaggctgtagctgtcagtgtcgccccctgtatcgctaaaccggatttcaaatatagggatgctgctaaggctattctgcgtagggctttgctgcgctggaatgatactggcgtggcgggtcaggtgcagtatgagtctgcgggtcctttcgcccagacgacacggtctaatactcccactaatttgttgtggccttctgagattgctgcgttgaagaagttgtgtgagggtgatggtggggctggtaaagcgttcactattacaccgaccatgaggagtagtgtgaatcattctgacgtgtgttccacggtgtggggtggaggttgctcgtgcgggtcgaatattaacggctacgctggacctttgtgggagatatgatatgaccagttttccttacggtgaaacggttgtgatgcttcaaccgactgttcgtgtcgatgatcttggtgacaaggttgaggattgggggcatcctgtagaaaccgtgtaccataacgtggccatctatgcctccgtttcgcaggaggatgaggccgcggggcgtgactctgactatgagcattggtcgatgctgttcaagcagcctattgtgggtgctgattatcgttgccggtggcgtattcggggtgttgtgtgggaggctgacgggtctcctatggtgtggcatcatccgatgtctggctgggatgctggtacgcaggttaatgtgaagcgtaagaagggctgatagattgtggctcaggatgtgaatgtgaagctgaacttgccgggtattcgtgaggtgttgaagtcttctggggtgcaggctatgttggctgagcgtagcgagcgtgtcaagcgtgcggcctcggcgaatgtgggcggtaacgcttttgataaggcccagtatcgtaatggcttgtcgtcggaggtacaggttcaccgtgttgaggctgtggcgaggattggcaccacctataggggtgggaagcgtattgaggcgaagcatggcacgttggcccggtcgattggggctgcgtcgtgatcgtttacggtgatcctcgcgtgtgggctaaacgtgtgctcaaggatgatggatggctgtccgatataccgcgtacagggacggtgcctgaggatttcagcggtgacctggtctggttggcgttggatggtggtccgcagttgcatgttcgtgagcaggcgtttttgcgggtgaacgtgttttcggatactccggatagggctatgtctttgtcgcgtcgtgttgaggctgttctggctgatggtgtggacggtgaccctgtggtgtactgtaaacggtctactggtcccgatttgctggttgatggtgcacgttttgatgtgtattcgctttttgagctgatatgtaggcctgcggagtctgaataagcttattgtttttgttttaatgtaattgtttgatatttaatgggggttatgatggctgcaacacgtaaagcgtctaatgttcgctctgctgttacgggtgacgtctatattggtaaagctcatgccggtgacactattgatggtgtgaagacggttcctgacggtcttaccgctttagggtacctgtcggatgacgggtttaagattaagcctgagcgtaaaacggatgatttgaaggcttggcagaatgcggatgttgttcgcactgtggctacagagtcgtctatcgagatttctttccagctgatcgagtctaagaaagaggttatcgaactgttttggcagtcgaaggttactgccggagccgattcgggttcgttcgatatttcacctggtgccacgacgggtgttcacgccctgttgatggatattgttgatggtgatcaggttattcgctactatttccctgaggttgagcttattgatcgtgacgagattaagggcaagaatggcgaagtgtacgggtatggtgtgacgttgaaggcgtatcctgcccagattaaccataagggtgatgcggtgtcgggtcgggggtggatgacggctttaaaagctgatactcctccggttccgccttctccgaagcctcagccggatccgaatccgccatctgagaactgatacacgattttaggggattgttgatagatgagtgacataggttacacgttaaagattggtgaccgtagctgggtgttggcggatgcggaggaaacagcgcaggctgttcctgcccgcgtttttcgccgtgccgccaggattgcccagtcgggtgagtctgcggatttcgcccaggttgaggtgatgttttccatgttggaggctgccgccccagaggatgctgtggaggccttggaggggcttcctatggttcgtgttgccgagattttccgtcaatggattgaattcaagcctgacggtaagggtgcctcgctgggggaatagtttggctccacggcctgattgatgattatcgtggggccatcgaatacgatttccgcactaaatttggtgtttctgtttatagtgttggtggcccgcagatgtgttggggtgaggctgtccggctggctggcgtgttgtgtaccgatacgtcgagccagttggcggcccacctgaatggttggcagcgcccgtttgagtggtgcgagtgggctgtactggacatgctggatcattacaggtctgctaatagtgaggggcagccggagcctgtggcgaggcctacggatgagcgtagggcccggtttacctctgggcaggtggacgatattttggcgcgtgctcgtgccggtggcggggtgtctcgcgagattaatattatggggtgaatagtgtatgtctggtgagattgctcccgcatatgtgtcgttgtatacgaagatgcctggtttgaaggcggatgttggtaaacagctttccggggttatgcctgctgagggtcagcgttcgggtagcttgtttgctaagggcatggagttggcgcttggtggcgccgcaatggtgggtgccatcaatgttgccaagaagggtttgaagtctatctatgatgtgactattggtggcggtattgctcgcgctatggctatcgatgaggctcaggctaaactgactggtttgggtcacacgtcgtctgacacgtcttcgattatgaattcggctattgaggctgtgactggtacgtcgtatgcgttgggtgatgcggcgtctacggctgcggcgttgtctgcttcgggtgtgcagtctggcgggcagatgacggatgtgttgaagactatcgccgatgtgtcttatatttcgggtaagtcgtttcaggatacgggcgctatttttacgtctgtgatggctcgcggtaagttgcagggcgatgacatgttgcagcttacgatggcgggtgttcctgtactgtctttgcttgccaggcagacgggtaaaacctcggctgaggtgtcgcagatggtgtcgaaggggcagattgattttgccacgtttgcggctgcgatgaagcttggcatgggtggtgctgcgcaggcgtctggtaagacgtttgagggcgctatgaagaatgttaagagcgccctgggttatttgggtgctacggctatggccccgtttttgaacggcctgcggcagatttttgttgcgttgaatccggttattaagtctatcacggagtctgtgaagcccctgtttgcgtcggtggatcaggggattcagcggatgatgccgtctattttggcgtggattaaccgcatgccgggcatgatcacgagaatgaatgcacagatgcgcgccaaggttgagcagttgaagggcatttttgcaaggttgcatttacctgtccctaaagtgaatttgggtgccatgtttgctggcggcaccgcagtgtttggtattgttgctgccggtgtggggaagcttgttgcagggtttgccccgctggcggtggcgttgaagaatctactgccgtcgtttggtgctttgaagggtgccgctggcggtctgggcggcgtgtttcgcgccctgggtggccctgtcggtattgtgatcggcttgtttgctgccatgtttgccactaacgcccagtttcgtgcctctgtgatgcagcttgtgggtgttgtaggtcaggctttgggccagattatggcggctattcagccgctgtttggtttggttgccggggttgtggcacagttggcgccagtgttcggccagattatcggtatggttgcgggtttggctgcccagctggtgcctttgattagtatgcttgtcgcccggctggttcctgtgatcacgcagactattggtgcggtgacgcaggttgctgccatgttgttgccggcgttgatgccggtgttgcaggctgttgttgctgtgatacggcaggttgttggcgtggtcatgcagttggtgctggtgttgatgcctgtgattcaacagattttgggtgctgtgatgtctgtgctgccaccgattattggccttattcggtcgttgatgcctgtgattgcggcggttatgcgtgtggtggttcaggttgttgcggttgtgatacaggtggtggcccgtattcttgctgtggtggctccgatggtggctgctgtggtagggtttgttgcacgtattgttggtgctgtcgtgtcggctgttgcccgtgtgattgctgctgttgcccgtgtcatctcgtgggttgttgcccattttgtgtctggtttggcgcgtatgggttcggtggttcaggctggctggaatcatattagggcgtttacgtctgcgtttattaacggtttcaagtcggtgatttccggcggcgtgaacgctgttgttgggttttttgcccggatgggttcttcggttgcctcccatgtgaggtctggttttaacgcggctcgtggcgctgtttcgtctgcgatgaatgctatccgtagtgttgtgtcttcggtggcgtctgctgttggcgggtttttcagttcgatggcgtctagggttcgtagtggtgctgtgcgcgggtttaatggtgcccgtagtgcggcttcttctgctatgcacgctatgggctcggctgtgtctagtggtgtgcatagtgtgataggttttttcaggaatcttcccagtaatattaggggcgccttgggtagtatggggtccttgttggtgtctgctggccgtgatgtggtgtctggtttgggtaatggtatcaagaatgctatgagtggcttgttggatactgtgcgtaatatgggttctcaggttgctaatgctgcgaagtcggtgttgggtattcattccccgtctcgggtgtttcgtgaccaggttggccggcaggttgttgccggtttggctgaggggatcaccgggaatgctggtttggcgttggatgcgatgtcgggggtggctggacggctgcctgatgcggttgatgcccggtttggtgtgcgatcgtctgtgggctcgtttaccccgtatggcaggtatcagcggatgaatgataagagtgttgtggtgaatgtgaatgggcctacttatggtgatcctaacgagtttgcgaagcggattgagcggcagcagcgtgacgctttgaatgcgttggcttacgtgtgattggggggtgttgtgcatgtttattcctgacccgtctgatcgttctggtttgactatgacatggtttatggatccgctgtttggcgacgagcgtgtgcttcatttgacggattatacgggtgcgtctcctgtcatgttgttgaatgattcgttgcgcggtttgggtgttcccgaggttgagcatttttctcaaacacatgttggggtgcacggctcggagtggcgcggttttaatgtgaagcctcgcgaggtgacgctgccggttttggtgtcgggtgttgacccggatccggtgggcgggtttcgtgacggttttttgaaagcctatgacgcgttgtggtctgcttttcctccgggcgaggtgggggagttgtctgtgaagactcctgccggtgttgagcgtgtgttgaggtgccggtttgattcggctgatgacacgtttactgtggatccggtgaacaggggttatgcccgctatgtgcttcatttgacggcttatgacccgttttggtatggggatgagcaaaggtttcgatttagtaacgcgaagttgcaggattggttgggtggcggccctgtcggcaagaagggtacagcgtttcctgtggtgttgacgcctggtgttggttcgggttgggataacctgtcgaataagggtgatgtgcctgcgtggcctgtgattcgtgttgagggtcctttggagtcgtggtctgtgcagattgatggtttgcgtgtgtcatcggattatcctgtcgaggagtatgattggatcactattgatacggatcctcgccagcagtctgctttgttgaacgggtttgaggatgtgatggatcgtctggatgagtgggagtttgccccgattccgcctggcggttctcggagtgtgaatattgagatggttggtttgggtgccattgttgtgtcggtgcagtacaggtttttgagggcttggtgaatagttgatggctggtcttgttccgcatgtaacattgtttacgccggattatcgtcgtgtggcgcctatcaatttttttgagtcgttgaagttgtcgttgaagtggaatggtttgtctacgctggagttggtggtgtctggggatcattctaggcttgacgggttgactaggccgggtgcacggctggttgttgattatggtggtggccagattttttctggtcctgtgcgtaaggttcatggtgttgggccttggcggtcttctagggtgactgtcacgtgcgaggatgatattcgcctgttgtggcgtatgttgatgtggcctgtgaattatcgtcctggtttggtggggtctgagtggcgtgcggacagggattatgcccactattctggtgcggcagagtcggtggctaagcaggtgttgggggataatgcttggcgttttccgcctggtttgtttatgaccgatgatgagcgtcgtggccgctatattaaggattttcaggcccggttccatttgtttgccgataagttgttgccggtgttgtcgtgggctcggatgactgtttcggtgaaccagtttgagaatgcgaagtttgatcagcgtggtttggtgtttgattgtgtgccggctgtgacgcgtaagcatgtgttgactgctgagtctggttcgattgtgtcgtgggagtatgtgagggatgccccgaaggctacgtctgtggttgtgggtggccgcggcgagggtaaggatcggctgttttgtgaggatgttgattcgatggccgaggatgattggtttgatcgtgtcgaggtgtttaaggatgcccgtaacactggttctgagaaggtgtctctcttcgatgaggctgagcgggtgttgggggagttgcaggcttcgtcggggtttaagatcgagttggcggagtcggatgtgctgcgttttgggccgggcaagctgatgcctggggatttgatctatgttgatgtgggttctggccctattgcggagattgtgcggcagattgatgtggagtgtgtatcgcctggtgatggttggacgaaggtgacacctgttgctggggattatgaggataatccgtcggcgttgctagcacggcgtgtggctggtttggctgcgggtgtgcgggatttgcaaaaattctagaaaagattaggggtttgttgtgggtattgtgtgtaaagggtttgatggtgtgttgaccgagtatgattgggctcaaatgtctggtctgatgggtaatatgccgtcggtgaaagggccggacgattttcgcgtcggcactactgttcagcgtgccacagtgttgtgtgaggttttgccggggcaggcttgggctcacggggtgatgtgcacgtcgaatagtgttgagacggtgacggggcagcttccgggccctggtgagacccgctacgactatgtggtgttgtctcgggattgggagcagaacacggccaagttggagattgttcccggggggcgtgcggagcgtgcccgtgacgtgttgcgtgcggagcctggcgtgttccatcagcagctactggctactttggtagtgtcgtctaacgggttgcagcagcagctggatcggcgtgctgtagcggccagggtggcgtttggggagtctgctgcgtgtgatcctacccctgtggagggtgatcgtgtgatggttccttctggggctgtgtgggctaatcatgccggtgagtgggtgctgttgtcccccaggattgagacgggttctaagcagatccagtttggcgggtctgctgtgtatgcttacacgatcccgtttgagcggccgtttagtagtgcgcctgttgtggtggcgtctatggctacggctgctgggggtactacccagattgatgtgaaggcctacaatataacggctaaggattttggtttggcgtttatcacgaatgatggttcgaagccgaatggtgttcctgctgttgcgaattggattgctgtcggtgtctgatcgtgccggtgtgctgtttgatggtggtgtgatgttggggggctgtggtgtcgtggtttactcctgcactggtggcccctatttgtaccgcgttggctactgttttgggttctgttcaggcggtcacgtctagatcgaggaagcgtttgcgccgcctgtcggcgcaggtggatgctttggaagagtatacgtggtgtgtgcggcgcgaggtgcgccagtttaacgcccggcttcctgatagggttgatccgattgttttgcctgagttgcctagtttcctgtcggacacgttggggggtgaatgatgagggagttggaggaggggaagcggcagcgccgcaattttgagaaggcttcactggtgttgttgtttttgtcgcttgtactgttggcggggttgccgggggtgctttacggtacgggtctgtggcttcccaaagggattcggagcaggctaaagcccagtcgaatggtacagccgccaggggtttggccagccgcgtgaagcgggtgtgtgcttcgggtggggtggagtctgtgcggcttcaccagtctggcttgtgtgtggatgctcagcgtgttgagcgtagcgtgcagggtgtgcctggcccggctggtgtgcgggggccgcaagggccgcaggggccggctggtgttgatggttcggccgggctggttggtcctgttggtcctcagggttccccgggtttgaatggtgtgaaaggtcctgacgggttgcccggcagtgacggatcggatggccgtgacggtgtgaacggggctgacggtaaagatggtgtgcctggtagggatggtgttgatggggctgatggtggccgtggacttgccggcccccctggtgcagccggtgcacagggtgagcgtggccctattggccctgttgggcctgtgggtccgcagggttctgccggtgccgacggtacgaatggtcgggacggtaaggacggtaaggatggccgttctgtgatggctatgtactgttctgatggtcgcctggttgtgaaatatagtgactgtgcggcctctaccgtatcgggctcggcggcctgccagagtgtgaaaccatcaccgatggttaccatatcatcccacaaaaagtaatatgaggaggttgtggctgtgatggtcattgtttggggtggtgtgtggtgaggtttattcctgcggcgcatcactcgagcggttcgaatagtccggtgaaccgggttgtgattcatgcaacatgcccggatgtggggtttccgtccgcctcgcgtaaaggacgggcggtgtccacggcaaactattttgcttccccatcgtctggcggttcggcgcattacgtgtgtgatgttggggagacggtgcagtgcctgtctgagtctacgattggctggcatgccccaccgaatccgcatagtttgggtatagagatttgcgcggatgggggttcgcacgcctcgttccgggtgccggggcatgcttacacgagggagcagtggctggatcctagagtgtggcctgcggtggagaaggctgccatcctgtgtagacgtttgtgtgacaagcatggtgttccgaaaaggaaactgtctgtggccgatttgaaggctggcaggcggggtgtgtgtggccatgtggatgtgacggatgcgtggcatcagtcggatcatgacgatccggggccgtggtttctgtgggacaggtttatggccgtggtctgcggtcgcgatgagagtggggagttaactgtggctgatgtgaaagccttgcatgatcagattaaacaattgtctgcccagctcaccggttcggtgaataagctgcaccatgatgttggtgtagagcaagtgcagaatggtgatttgggtaaacgtgttgatgccttgtcgtgggtgaagaatccggtgacggggaagctgtggcgcactaaggatgccctgtggagtgtctggtattacgtgctggagtgtcgcagccgcatcagtaggcttgagtctactgttaacggtttgaaaaagtgatggtggtttgttgtgggtaaacagttttggttaggtttactggagcgggcggctaagacttttgtgcaaacgtttgttgcggtgttgggggttaccgcgggtgtcacgtatactgcggagtcgtttcgcggtttgccgtgggagtctgccctgattacggccacggttgctgcggtcctgtcggtggctacctcgtttggtagcccgtcgtttgtggccggtaagccgaaaaccacgcctgtggatgcgggtttggttccgccggatgatcccggaatagtggagcctcacatggtggatgtgtcggatcctggcatgatcgagcctgcagatgatgtggatcttggtgtaggctatgtgccgaaacatgctgccgagtcggaggttggcacagtagagtctactgttgcataagtggatatagatgtgtgccccagcggtgctgccacgattgtgtggtggttgccgctggggcactatttttgtatattgcggtgtggctatgattcgttgctgtcgatggtgtcttcgagcatctgatacaggtggaggcaggtagagatcgtttcgctggcctggtcgagaacgttccggccgataacgtttttgtggttgtcgcggtggcggatgatagcccacatgatctcgtcggctgccgcctgtaatagtttggcctggtatgcgattccggcgagccagtctagtgcttcctggcttgcataggggctctggttctcgctgttgccgcgggtgttgctgttgtttgtggggtgtcctgcactgtcgcaaaaccataggatttcgctgcactcgtctagcgtgtcctggtcgatagcaagatcgtcgaggctgacttctttgacggtaagattcacgttgtcgagtgagattggtacacggtactggttttcgacaccgccaacaatgttttccaactgttgcatgttggtgggttgttgttggatgatacggtgtaccgctgttttgagggcagtgtaggggatattgtgtgtgttgttcatggttttatcccatccctgtgctgtcgtcgttgccgtctgggtagtatctactgtttgcgtatcctgtgagggtgatgagtgtttggtctgcccactgtttcactgtctgccgggtgacacccaatcgttgggcggccgacgcataggtttggtcatacccgtatacttccctgaatgctgccaacctggctaagtgtatcctctgtttggatggctcgcaggtgagggtgtagtcgtcgatggctacctgcaggtcgatcaaggtggcaatgttgttgccgtggtgttgtggcgcggttggtgggggtggcatgcctggctccacactgggtttccatgggcctccgttccagattcattgggcggcttggataatgtcggcggtggtgtaggttcggttcatgcgtcatcccctgaataggttgtcgaggttgtctgggttgctggtgtcgaatcgtccgacgcagtggcagtagtcgtacatgagtttgataatgtgttggtggtctcccaaataggtgtttccgctgatgctgtaggtggctgtgccgtctttgctgatggtgtatttggcggtgatggtttcgggtgtttcggtgtcggtgatgatggctgtggtggtggcgcctacggtttgtagcccggttgtttgggttccgtcg

SEQ ID NO: 26 - DNA, 4501 bp, Pahexavirus sp.
  source 1..4501: mol_type = genomic DNA
cctaggaagtgggctaaacgtgtgttggctgatgatggctggctgtctgatataccctgtgtggggacggtgtctgacgattttacgggtgatttgatttggttggcgttggatggtggcccgcagttgcatgtgcgcgagcaggtgtttttgcgggtgaacgtgttttcggatactccggatagggctatgtcgctagccaggcgtgttgaggctgtccttgcggatggtgtggacggtgaccctgtggtgtactgtaaacggtctactggccctgatcttttggttgatggtgcacgttttgatgtgtattcgctttttgagctgatatgtaggcctgtcgaatccgagtaaacgttttgtttgatattgttgtttgttttttgtttgatattgtttttgggggttatgatggctggaacacgtaaagcgtctaatgttcgttccgctgtgacgggtgacgtctatattggtaaagctcatgccggtgacactattgatggtgtgaagacggttcctgacggtcttaccgctttagggtatctgtcggatgacgggtttaagattaagcctgagcgtaaaacggatgatttgaaggcttggcagaatgcggatgttgttcgcactgtggccacggagtcttctatcgagatttctttccagctgatcgagtctaagaaggaggttatcgaactgttttggcagtcgaaggttactgccggagccgattcgggttcgttcgatatttctcctggtgccacgacgggtgttcatgccctgttgatggatattgtggatggcgatcaggttattcgctactatttccctgaggttgagttgattgatcgtgacgagattaagggtaagaatggcgaggtgtacgggtatggtgtgacgttgaaggcgtatcctgcccagattaataagaagggtgatgcggtgtctggtcgggggtggatgacggctttaaaagctgatactcccccggttcctccttctcctaagcctgagccggatcctaatccgccgtctaataactgatacacatagtttaagggattgttgatagatgagtgacacaggttacacgttgaagattggtgaccgtagctgggtgttggcggatgcggaggaaacagcgcaggctgttcctgcccgcgttttccgtcgtgccgctaagattgcccagtcgggggagtctgcggatttcgcccaggttgaggtgatgttttccatgttggaggctgccgccccagaggatgctgtggaggccttggaggggcttcctatggtgcgtgtggccgagattttccgccagtggatggaatataagcctgacggtaagggtgcctcgctgggggaatagtttggctccacggcctgattgatgattatcgtggggccatcgaatacgatttccgcaccaagtttggtgtttctgtttatagtgttggtggcccgcagatgtgttggggtgaggctgtccggctggctggcgtgttgtgtactgatacgtcgagccagttggcggcccacctgaatggttggcagcgcccgtttgaatggtcggagtgggcggtgttggacatgttggatcattacaggtctgctaatagtgaggggcagccggagcctgtggcgaggccgacggatgagcgtagggcccggtttacgtctgggcaggtggacgatattttggcgcgtgttcgtgccggtggcggggtgtctcgcgagattgatattatggggtgaatagtgtatgtctggtgagattgcttccgcgtatgtgtcgttgtatacgaagatgcctggccttaaaagtgatgttggtaaacagctttccggggtgatgcctgctgagggccagcgttcgggtagtctttttgctaagggcatgaagttggctcttggtggtgctgcaatggtgggcgccatcaatgttgctaagaagggcctcaagtcgatttatgatgtgactattggtggcggtatagctagggcgatggctattgatgaggcgcaggctaaactgactggtttgggtcacacgtcttctgacacgtcttcgattatgaattcggctattgaggctgtgactggtacgtcgtatgcgttgggtgatgcagcttctacggctgcggcgttgtctgcttcgggtgtgcagtctggcgggcagatgacggatgtgttgaagactatcgccgatgtgtcttatatttcgggtaagtcgtttcaggatacgggcgctatttttacgtctgtgatggctagcggtaagttgcagggcgatgacatgttgcagcttacgatggcgggtgttcctgtgctgtctttgcttgccaggcagacgggtaaaacgtctgctgaggtgtcgaagatggtgtcgagggggcagattgattttaacacgtttgctgctgcgatgaagcttggcatgggtggtgctgctcaggcgtctggtaagacgtttgagggcgctatgaagaatgttaagggcgccttgggctatctgggtgctacggctatggccccgtttttgaacggtttgcggcagatttttgtggcgttgaatccggtgatcaagtcggtcacggattctgtgaagcccctgtttgcgtcggtggatcaggggattcagcggatgatgccgtctattttggcgtggattaaccggatgccgggcatgatcacaagaatgaatgcacagatgcgcgccaaggtggagcagttgaagggcatttttgcgagaatgcatttgcctgtccctaaagtgaatttggctgccatgtttgctggcggcaccgcagtgtttggtattgttgctgccggtgtggggaagcttgttgcagggtttgccccgttggcggtgtcgttgaagaatttgttgccgtcgtttggtgctttgaagggtgccgccggggggcttggcggagtgttccgtgccttgggtggccctgtcggtattgtgatcgggctgtttgctgccatgtttgctacgaacgcccagttccgtgccgcggtgatgcagcttgtgggggttgttggtcaggcgttggggcagattatggccgccttgcagcctgtgtttggtttggttgctggtttggtggcacggttggctccagtgttcgcccagattatcggcatggtggccgggttggctgcccagttgatgcctgtgattggtatgttggtggcccggctggttcctgtgatcacgcagattattggcatggtgacgcaggttgcggccatgttgctgccgacgttgatgccggtgttgcaggctgttgttgctgtgatacgtcaggttgttggcgtggtcatgcagttggtgccggtgttgatgcctgtgattcagcaaatacttggtgctgtgatgtctgtgctgcctccgattattggtttgatcaggtcgttgatgcctgtgattgcggcggttatgcgtgtggtggttcaggttgttgcggttgtgatacaggtggtggcccgtattcttgctgttgtggctccgatggtggctgctgtggtcgggtttgtggcccgtattgttggtgctgtcgtgtcggctgtggcccgtgtgattgctgctgttgcccgtgtcatcgggtgggttgttgcccattttgtgtctggtttggcgcgtatgggttcggtggttcaggccggctggaatcgtatcaaatcgtttacgtctgcgtttatgggcggttttaagtcgatcatttctggcggtgtggccgcggttgtggggttttttacgcggcttggtgtgtcggttacttcccatgtccggtcggggtttaacgcagcccgtggtgctgtttcggctgcgatgaatgggattcgtagtgtggtgtcttcggtggtgtccgcggtgggctcgttttttgggtcgatggcttctcgggttcgtggtgctgcctcgtccgggtttaatggtgctaggagtgtggcttcttctgctatgcatgctatgggctcggctgtgtctagtggtgtgcatagtgtgttagggtttttccggaatttgcccagcaatattaggggcgccttgggtaacatggggtctttgttggtgtcggctggccgtgatgtggtggccggtttgggtaatggtattcggaatgctttgagtggcctgttggatacggtgcgtaatatgggttctcaggttgctaatgcggcgaagtcggtgttgggtattcattccccgtctcgggtgtttcgtgacgaggttggccggcaggttgttgccggtttggctgaggggatcacggggaatgcgggtttggcgttggatgcgatgtcgggtgttgctacgcagctgccggatgctgtggatgcccagtttggtgtgcgatcgtctgtgggctcgtttaccccgtacgaccggtatcggcgtgcgagtgataagagtgttgtggtgaatgtgaatgggcctacttatggtgatcctaacgagtttgcgaagcggattgagcggcagcagcgtgacgcg

SEQ ID NO: 27 - DNA, 8371 bp, Pahexavirus sp.
  source 1..8371: mol_type = genomic DNA
ccctcgccgaatgcgcactcctacaacagacactcgaagacaccctagacgacaacctgtaaaacccctgtagacacaaaaatagtgccccagcagcaaccaccacacgatcgtggcagcaccgctggggcacacacatatattcacttatgcaacagtagactctaccgtgccaactgccgactcagcagcacgcctcggcacatagcctccagcatcggcatcgtcgataggctctatcatgccaggatccgtttcgtcaaccatgtgagactccactattccaggatcatccggtggaacaagcccagcatccacaacaggcgtcgttttcggtttaccggcaacaaacgacgggttaccaaacgaggtagcaaccgacaacaccgcagccaccgttgctgttatcaaggcagattcccacggcaaaccgcgaaacgactccgcagtatacgtgacacccgccgtcacccccaacacagcaacaaacgtttgcacaaaagtcttagccgcccgctccagtaaacctaaccaaaactgtttacccacaacaaaccaccatcactctttcaaaccgttaacagcagactcaagcctgtcaatacggctacgacactccaacacgtaataccagacactccacagggcatccttagtgcgccacagcttccccgtcacaggattcttcacccacgacaaagcctcgacacgcttacccaaatcaccattctgaacctgaaccacaccaacatcgtgatgcagcttattcaccgactgggccacctgtgccgacaactgtttaatctgatcatgtaacgcttgtacatcagccatactcaactccccactacttgaaccgccgccgtggccattcaccacagccataaatttgtcccacggaaaccacggccccggatcgtcatgatccgactggtgccacgcatccgtcacatccacatggccgcaaacaccccgcctgccagccttcaaatcggccacagacagtttccttttcggaacaccatgcttgtcacacaactgccgacacaggatagcggcacgctccacagcgggccacacccgcggatcaagccactgctcatgagtgtaagcatgccccggcacccggaacgaggcgtgcgaacccccatccgcgcaaatctctatacccagactatgcggattcggcggggcatgccacccaatcgtagactccgacaggcactgcaccgtctccccaatatcacacacataatgcgccgaaccacccgacgatggggacgcgaaatagtttgctgtagacaccgcccgccccttacgcgaagcggacggaaaccccacatccgggcacgttgcatgaatcacaaccctattcaccggactattcgaaccggcagagtgatgcgccgcaggaatgtatctcacaacacgccacccccaaacaccactaacatcacagcaacacctttcccctattttttcatctacgggatgatacggtaaccacaggtgacggtttcacactctcacaggccaccgagcccgatatggtagaggccgtaccgtcactatatttcacaaccaggcggccaccggaacagtgcacagacaccacagagcgcccatccttgccatccttaccattcgtgccatcggcaccggcagaaccctgcggaccctgaggcccaacagggccacgctcaccctgttcaccctgtgcaccggcaacaccaggggggccggcagggccacggccaccatcagccccatcggcgccatccctaccaggcacaccatcccggccatccgaaccgttaacaccggcaacaccgtcacggccatccgaaccgttagcgccaggcaacccgtcaggacccttcacaccattcaaacccggggaaccctgcggaccaacagggccaaccagcccagccgaaccatcaacaccatcccggccgtcaacccctgcaggcccttgcgggccacgcacaccagcaggacccggtacaccctgcacgctacgctcaacacgctgagcatccacacacaaaccagaccggtgaagacgcaccgactcctgcccgccagaggcacacacctgccgcacacgggcagccaaccctttagcggctgtaccattcgactgggctttagcctgctccgaatcccgctgggaagccacagcaccgaaacgtaaagcacccccagcaaccaccgccaacagcacaagcgacaggaacaacagtatcagggaagccttctcaaacgagcggcgctgccttttttcttcctccaactccctcacaattcaccccccaccaccatcaacagtatccttcaaaaactcgggcaaatcaggcatcttcaccggctcaacattctccggcagattcgcgttatagcggtgaacagtatggcgaatattccacgtgtattcttccatcgcatcaacctgcgcagacaactgcctaagcctcttcttcgacctgtacgtagccgcctgaatcgaaccaagaacagtagcgatagcggtacaaatagaggctacgagtgtgggtgtaaaccatgacactacagccccctactactacaaccaccacaacatgtcacatacccgcaagccgcgcattacacgccgacagcaatccagttagccaccgcaggcacaccattcggcttagaaccatcattcgtaataaacgccaaactaaaatccttggcagtaatattgtaggctttcacatcaatctgctgcgtgcccccagccgccgtagccatagacgccaccacgataggcggactatcaaacgggcgggcaaacgggatcgtgtaagcatacacagcagacccgccaaactggatctgcttcgaatccgtctcgatccgcggagacaacaacatccactcattgacatggttagcccacacagcccccgaaggaaccatcacacggtcaccctccattggggtaggatcacacgcagcagactcgccaaacgcaaccctagccgctatagcacgcctatccaactgctgctgcaacccgttagacgacaacaccaaagtcgccaacaactgctgatggtacacgccaggctcagcccttaacacgtcacgggcacgctccgcacggtcaccctgaacaatctccaacttggccgtgttctgctcccaatcccgagacaacaccacatagtcgtatcgggtctcccccgggcccggaagctggccggtcaccgtctcaacactattcgacgtgcacatcaccccgtgagcccacgcctgccccggcaggacctcacacaacactgtggcaccctgaacagtagtgccgacacgaaaatcgtccggccctttcacggacggcatattacccatcagaccagacatttgagcccaatcatactcggtcaacacaccatcaaaccctttacacacaatacccacaacaaacccctaacaattagaatttttgtaaatcccgcacaccggcagccaaaccggccacacggcgagccaacaacgccgacggattatcctcataatcccccgcaacaggagtcaccttcgtccacccgtcacccggcgaatcacactccacatcaatctgccgaacaatctccgcaatcgggccagaacccacatcaacataaatcaaatccccgggcatcagattgcctggcccaaaacgcaacacatccgactccgccaactcgatcttaaaccccgacgtggcccctaacccggacaacacctgctcagcctcatcaataagatgcacatgttccgaatccgtgttacgggcatccttaaacacctcgacacgatcaaaccactcatcctcggccaacgcgtcaaaatcctcacaaaacagacgatctttgccctcgccgcggccaccaaccaccaccgacgtagccttcggggcgtcacgcacatactcccacgacacaatagacccagactcggcagtcaacacatgctcacgcgtcacagcaggcacacaatcaaacagtaaaccacgctgatcctgcttcacattctcaaactgttccaccgtgacagtcatccgagcccacgacaacaccggcaacaacttatcggcaaacacgtgaaaccgcgcctgaaaatccttaatatagcggccacgactctcatcatcggtcataaacaaaccaggcggaaaacgccaagcattatctcccaacacctgcttagcaaccgactccgccgcacccgaatagtgggcataatcccggtccgcacgccactccataccaaccataccaggacgataattcacaggccacatcagcatacgccacaacagacggatatcatcctcacacgtgatagtcacccgcgaagaacgccacggacccacaccatgaaccttacgcacaggcccagaaaaaatctggccaccaccataatcaacaaccagccgtgcacccggcctagtcaacccgtcaagcctagaatgatccccagacaccaccaactccagcgtagacaaaccattccacttcaacgacaacttcaacgactcaaaaaaattgataggcgccacacggcgataatccggcgtaaacaatgttacatgcggaacaagaccagccatcaaccattcaccaagccctcaaaaacctgtactgcaccgacacaacaatggcacccaaaccaaccatctcaatattcacactccgagaaccgccaggcggaataggcgcaaactcccactctgtcaaacgatccatcacgtcctcaaacccatccaacaacgcagactgcttacgaggatccgcatcaatagtaatccactcaccctcctcgacaggataatccgaagacacacgcaaaccatcaatctgcacagaccacgactccaaaggaccctcaacacgaatcacaggccacgcaggcacatcacccttattcgacaggttatcccaacccgaaccaacaccaggcgtcaacaccacaggaaacgccgtgccatccttgccgacagggctgccacccaaccaatcctgcaacttagcgttactaaaacgaaacttctgctcatccccataccaaaacgggtcataagctgtcaaatgaagcacataacgcgcatagccacgattcaccggatcaaccgtaaacgtgtcatccaccgaatcaaaccgacaccgcagcacacgctcacgaccagacggggttttaaccgacaactccccctcctcgccaggaggaaacgcagaccacaactcgtcataggctttcaaaaaaccgtcacgaaacccgccagccggatcagggtcaacacccgacaccaacacaggcagcgtcacctcgcgaggcttcacattaaacccgcgccactccgaaccgtgcaccccaacatgagtttgagaaaaatgctccacctcagcaacacccaaaccgcgcaacgaatcattcaacaacatgacaggagacgaccccgtataatccgtcaaatgaagcacacgctcatcgccaaaccgcggatccatagaccaggtcacagtcaaaccggcacgatcagacgggtcaggaataaacatgcataccccctcaatcacatgtaagcctacgcgttcaaagcgtcacgctgctgacgctcaatccgcttcgcaaactcggcaggatcaccatacgtcgggccattcacattcaccacaacactcttatcattctcacgccgataccggtcgtacggggtaaacgagcccacagacgatcacacaccaaaccgggcatccacagcatccggaagctgcgaagcgacacccgacatcgcatccaacgacaaaccagcattaccagtaataccctcagccaaaccagcaacaacctgacggccaacctcgtcacgaaacaccctcgacggagaatgaatacccaacaccgacttcgcagcattagcaacctgggaacccatattacgcaccgtatccaacaggccgctcatagcattccggataccattacccaaaccagacaccacatcacggccagcagacaccaacaaggaccccatactacccaaggcgcccctaatattactggggagattcctgaaaaaacctatcacactatgcacaccactagacacagccgagcccatagcgtgcatagcagaagaagccgcacccctcgcagcgttaaacccggacgaggcagcaccacgaaccctagacgccatcgaactgaaaaatccgccaacagcagatgccaccgaagacacaacactacggatagcattcatcgcagacgaaacagcgccacgagccgcgttaaaaccagacctcacatgggaggcaaccgaagaacccatccgggcaaaaaacccaacaacagcgttcacgccgccggaaatcaccgacttgaaaccgttaataaacgcagacgtaaacgctctaatatgattccagccagcctgaaccaccgaacccatacgcgccaaaccagacacaaaatgggcaacaacccacgagatgacacgggcaacagcggcaataacacgggccacagccgacacgacagcaccaacaatacgggcaacaaacccgaccacggccgccaccatcggagccacaacagcaagaatacgggccaccacctgtatcacaaccgcaacaacctgaaccaccacacgcataacagacatgatgactggtatcaacgaccggatcaggccaataataggtggcagcacagacatgaccgcacccaaaatttgttgaatcacaggcatcaaaacaggcaccaactgcatcacaacaccaacaacctgccgtatcacagcaacaacagcctgaataaccggcatcaacgcaggcagcaacatggcagcaacctgtgtcaccgcaccaataatctgcgtgatcacaggaactagccgggcgacaagcatactaatcaaaggcaccagctgggcagccaacccggcaaccataccgataatctggccaaaaacgggagccaactgtgccacaaccccggcaaccaaaccaaacagcggctgaatagcggccataatctggcccaacgcctgaccaacaacccccacaagctgcatcaccgcgccacgaaactgggcgttagtggcaaacattgccgcaaacaagccgatcacaataccaacagggccacccagggcgcgaaacacgccgccaagccccccggcggcacccttcaaagcaccaaacgacggcagtagattcttcaacgcaaccgccaacggggcaaaccctgcaacaagcttccccacacccgcagcaacaataccgaacaccgctgtgccacccgcaaacatggcacccaaattcactttagggacaggcaaatgcaacctcgcaaaaatgcccttcaactgctcaaccttggcgcgcatctgtgcattcattctcgtaatcatgccaggcatacgattaatccacgccaaaatagacggcatcacacgctgaataccagcatcgacggcagcaaacatcggcttcacagaatccgtgacagacttaataaccggattcaacgcaacaaaaatctgccgcaacccgttaagaaacggcgccatagccgtggcaccaagataacccagggcacccttaacattcttcatagcgccctcaaacgtcttaccagacgcttgcgcagcaccacccatgccaagcttcatcgcagccgcaaacgtggcaaaatcaatctgccccttcgacaccatctgcgacacctcagccgaggttttacctgtctgcctggctagcaaagacagtacaggaacacccgccatcgtaagctgcaacatgtcatcgccctgcaacttaccgcgagccatcacagacgtaaaaatagcgcccgtatcctgaaacgacttaccagaaatataagacacatcggcgatagtcttcaacacatccgtcatctgcccgccagactgcacacccgaagcagataacgccgcagccgtagaagccgcatcacccaacgcatacgacgtaccagtcacagcctcaatagccgaattcataatcgaagacgtgtcagaagacgtgtgacccaaaccagtcagtttagcctgcgcctcatcaatagccatcgccctagctataccgccaccaatagtcacatcataactcgacttgaggcccttcttagcaacattgatggcgcccaccatcgcggcaccaccaagagccaacttcatgcccttagcaaaaagactacccgaacgctgaccctcagcaggcatcaccccggaaagctgtttaccaacatcacttttaaggccaggcatcttcgtatacaacgacacatacgcggaagcaatctcaccagactacactattcaccccataatata

SEQ ID NO: 28 - DNA, 20253 bp, Pahexavirus sp.
  source 1..20253: mol_type = genomic DNA
aaaactcactaatattatgcctcgagctatctctataatagccatggggatggtttctggggtgccgttgttgaggtcgtctagagtgtggaagatggtaacatcagcgtagatgcgatcggtgacctgtccgccgtagccttcggtgttgtgttctacgtcgtgtactttgaaggcgatggcggtggcgtcctggtttcgggaggggttgaagaaggtgctgttgctgttgttgtttcggtagttggcgagtcccataactgttatttcctttactgctttgttggtttgtttgttggtttatattggtttatcgggtgaggctgtttcgtttagtgcggaatgcctcagacacgtcagggttactagtgatgatcttcttgtactgtttgaggagatcggctagctgtgccttgctggtggctttgttgattttgtcgatgacgatgtcgttttcttgggatgtgatgttgtctacatagtctttggcggcctggttgtatcggtcttggaggatgatggatgcgctcgctacgagtgttgctagatcccagtctttggacacgtcatcgtttttgagtccgcccaataaatcgatgattgcttgttttgtctgctctgctgtgtctcctcggatgaccgcccatggtgcagcatagtctccaccatatttgagtgtgatcgtaatgcgatcatcagtgctattggtgttatcggtcactggtgctccttgctttcttctgttggggctgtgatggtggtttctaccgggtacctgtaggcgtctttcccgttgacggcccagcaggcgtccttgacggggcatcctttacagagtgctgtgacgtgtgggacgaagatgccttggctgattcctttcattgcttgactgtacatggatgatacatgctggtaggtgttgttgtcaaggtcgtagagttcggttgccgtgccttgtgtcggggacttgtcgtcgttgcggctggtggccggtgtccaaaacatgccttttgtcacatcgttgccgtattggttgagcatgtaccggtatgtgtgcagctgcatactgtcggcgggtaggcgtccggttttgaggtcgaggatgaaggtttcgccggtgtcggtgtcggtgaaaacgcggtcgatgtagcctactatttttgtgtcatcgtcgaggatggtttctaccgggtattcgatgcctggtttaccgtccaggattgcggtgatgtattctgggtgcttgcgcctccatgttttccagcggtccacaaaggtggggccgtaaaccatccaccagtcgtagtctttcttgtgtggcccgcccgactcacacatgtttttgcatattctgccggagggtttgatttctgtgccttcggattcggcgagggcgacttgggtgtcgaaaatgtttttgaatgatgagagtttgtctggcagtgcagggtattcggcgggattgtacaggtgtaggtcgtattgttcggtgatgtggtgtatggcgcttccggcgatggaggcgtaccatgtgtggtattgggcgtggtagccgtgggataggcgccatttttctccacattcggcccactgggtgagtgaactgtaggagatgtggcctggatggctgatggttttctggtattgtgctagaggcattacttgtcgcttttgttccatgggttgcgggagtcttggccggcattgtgttgctggtatgcgaggagtgcgaggcagtgccaggctgcgtgtgctagatgcggtagcccggattcgtggtcgaggttgttgccttgctgccatgatagtaggtgccggtagagggcgtcaacgctgtggctccacgggtatcctccggtccagttgttgtcgccgtatttggtggtaccgtagcctgccacagagcctagatcgtgcaaggctgcggggtcgatgagggagagcctgcagagtttcaattcttttcgggcaccggtgttggggtcggtgtacatgcgggtgggctcatccatgagatgtgtgctccttaagcgtgggttactggttgttgttgtgggcgagtgctacggcgagaatgatgatggcgagggtttctgcgataaggatgggtgttgtgatcatttgctgtctcggggattgttggtgagtgttgaggcgcctaggagggtggcgagggcgcatgcggcaatggtggcgagggcggctttatggctggttcctgttgcgtacatccatgtgatgatgccgccttgaatccatgccagtgtggtgaagaacgtttcgtaactgtgtagctcaatgttgttgggtgtgttcatgcttgctcctgaagaatggtgttgatggttttataaatgttgtacaggtctgtttcgatagataacagttggtgggtttcgtggtcgagatcaatgtctgggttgagggtgttgatgcgggaggcgatgacggtagctgtgcgtagtgtaccgccggtgtggtgaataatgtgtgccgtgtcagcgagtccggtggtgacagcgtagtgggagaggagaggcatagcggtccttggcgggttagtgttgcgggttgatgttgaggtcggtgacgttggggtgttcttctgttccggtgacgaggcagtggacggtgacgggtagtttggatgcgccgggttgtttcgcggttgcgccgtagacgatgctgaatgtgtctttaccgatggttttgtggagttggaggtcgatgtcggggttgccgttccatttgacgccttgggcggcggcctgctgttcggctttacggtcgcaggtgtgggctgcggtgatcatggtgagtccggtggatgtttcttcaccccttgcttgggcttgcttgtgggttttggcttgttcggcttgtagggagcgagtggcggctgcctgccgtgccgctttctcagcttcgcgctgctgggcggtatcaggtgtccatgtggtgttggctgtggtggcttgcggtgcgggctgtgatgcgagtggcggattgtcgtcgggtgctggcatgaatgaggctgcggcgatgatggcggctgtgatgcctgcgatggtgtagccttttttcttgttcatgactgttgtcccctttccggggtgttgttcggtgctgacatgattaatcatggtgtggacggttcctcatgtcaaggctgcgctcaacgattgtgagcgtttggtgtgtggctaggggttttatcgggcacacagggttagcaggtggccaatattgatgcgggtcacgttccagtagagttgtgtggcttctccgccggtgagtggcttccactcgttgtggctgaacacggtgccgtcggtggcgatgaatgtgttggggcgtagcttgtggagttcggcttccacgctttgccggtaggcttcggcgaggccctcgaaatccatgtggtcgcaggagaggttttcgaggcgtgtcaggtcgaagggtgtggggcagtcgtagctggcgggggtgtagagctgggtgaagtggttggcgatcttctgcatcatgattccttttctggtgatggtgtgttgatggttttatcgtgtggcttcggcaatgatggcgtccacatcgattgtgtcgatcatgtcgtggaggtcctcagcctcatccgcggtgagtggctgccagtcctggggtccgtatatggcaccgtcgagggtgacagtccacaggggccggatgagtcgtacggcttcttcgactttggcacggtgcaggcggcagatgatagacgtgtgggtgttgcctatgtcacatcctgccaggtgtgcggggtggagtgggttgatttctgtctgcccatagaggctggtgaaggatggggtgatgagtgtgccatccatgagggtgtgctcctttcgatggtgtatgggttgttgtggtttctagagtgtgtaggttgcaaccgggagtcaaggtggcgctcattcggattgagcgtttcatgctggagtgtcgggtgtgacagatgtcactcaagcatttactgcctctctcagcgtctcaaatcttctaggggtaggattatgcagggttaaccctgctgatcgattctagggcccttctagggtgtctcaggggtatgtctgggtgatagcgggtgtggcagatgatctagcgagtcaaggtgccgagctgagacataagatctatcatctaggtgtgtgaaatgtatcccactcgcctagtatggtgtgcactctcgaggtcgctctgtcgatctggcgtagagggtgtagcccagaaataccgtttaaagccttcacacggcgcctaggagcgccttgcagggtgggggctaggtatttatacccccaagcaattctgatcgattctagacgcctccaggagactgatacgcgatcaaccatctcggcatagatcatcaacccctatcctggttagctaagcctcaactatgtggacagtgtgggatactgtaggggaagaaggacacggtaaaagaaagaggggggggggagcatcagccttcaagccttaaggtcttaacacttagcaccgagccccctcaagggctcggcatcagtccgagcaggcacagctcatcaggcacagcactgaaaggggtacacgccatcagggaaggcttgagagtacgaggagccctagcgacgagtactcgaaagcctgagggaacaccatcagcactgatgggcctagcgtgttcggaaaggacacaagagtaaagtgtgacagcggcccgggagtgaaacccgttctgactaggggtttcagccttaaccacctgtaaaggttacaagactctaagaaaatttaagaaaactcttaggaagaaagttgtgttgatgtcaccccaaaaacacctaaaatagccctcaaacccgctaatagagccaaacagtcaagtttgactcgtctagacggcgtatgctaggctggacaggtagccagctggacgcaaggccgaaatccgctgacgcggctttcacccttacatccatcagtctaccaaagacttaaagacctaagggcttagcgctaaggtgctgatagcttagcaccgagcccctcaagggctcggcatcagtcttaggtacttaaggatctaagttactataaaagctttaaagtcttaaagtaactataaaaccttaaaggctaagcacttaaggatataaaattaacatcagtgcgtaagacttaaagagttaaaataaccataaagctttaaacacttaaagtaactataaaacattaaagaccttaagtacttaaagttaaccatcagtcttaaactttaatattataacctataagtcttaaagcttataagtataataatataatataagtattaaagcttataagttataaaagttttagaagagctaaggggttaacttctttacttctctactctctttggttctttctctcttctcttcttttcttcatcaggggagaagaggaaccttttgccatcagcgctgatggtctttacgccgtgtgtctcgtgtgcttggtcgcaagctcccggttgcacactccccacactcttacactcgtgtccctttcaggcttggcgtgttcggctgaaggcgtacggcgtgtcacgctctcacccttaacactaggtaagacttaaagtgtatattatatgtagaagactttaaaaccttaaggtgtttccgcttagcctgtgtcatacaccgctaggcgctaggattttaaacgcgaacacccatccacccccatttttcttccgtgtccttctctttcaacaccgctggggggcgatgtgatctttttcacataccaggggggtagtggagaaaacaaacaccccagcaagctcaagacaccccctcaaacgcacaaaacagggcctaggatcgaacagcagggcaccggtagagtattcatacccccagacgattccaggccgttacaggagcaatgagaggctcacaggggccataggagatcaggggacatgatggcacacaccaaccgcaccgcatccgcctcacaccggcgctggcgggcaagactcatcacccaagcccgacaacaaggccaaaccgaatgcccactctgcggagcccagatagcctgggacacacacgacctgccaaccagccccgaagccgaccacatcacacccgtcagccggggaggactcaacaccctcgacaacgggcaaatcatctgcagaacatgcaacagaagcaaaggcaatcgcagcgaaccaaacattagtttccaacaacaaactacaaaaaaccttgtttcatggtgaaaaacccgccaacccccgacggggacaccccctgcacacccgtgcaagacctcgtacggcttagtgaaatacctcccttttgtggatttgtctgtttgtcgactttttgtgttggtggtgagtgttgtgcagcctgagcttcctgatagtcgtgattggtgtggggagacgcgtcgttggtggcgtgtgtggggtgaggatagtcgcgcgccgtatgtgtctgatgaggagtggttgtttctcatggatgctgcggtgattcatgatgtggtgtggcgtgagggtcgcgctgatttggtggcttcgcttcgtgctcatgtgaaggcttttatgggcatgttggatcggtattcggttgatgtggcgtctggtggccgtggtgggggttctgcggtggcgatgattgaccggtataggaggcgcaagggggcctgattaggtgtctggtgttgttgggtctcaggttcctcgtcaccgtgtggctgcggcgtattcggtgtctgctggcggtgatgcgggtgagcttggtagggcgtatgggttgacgcctgatccgtggcagcagcaggtgttggatgattggctggctgtcggtggtaatggcaggcttgcttctggtgtgtgtggggtgtttgtgcctcgccagaatggcaagaatggtattttggagattgtggagttgtttaaggcgactattcagggtcgcaggattttgcatactgctcacgagttgaagtcggctcgtaaggcgtttatgcggttgaggtcgttttttgagaatgagcggcagtttcctgacctgtttcgtatggtgaagtcgattcgtgcgacgaatggtcaggaggctattgtgttgcatcatccggattgtgccacgtttgagcgtaagtgtggctgtccgggttggggttcggtggagtttgtggctcgtagccggggttctgctcgcgggtttacggatgatgatttggtgtgtgatgaggctcaggagttgtcggatgagcagttggaggctttgcttcctacggtaagtgctgccccgtctggtgatccgcagcagattttccttggtacgccgcctggcccgttggctgacgggtctgtggtgttgcgtcttcgtggtcaggctttgtcgggtggtaaaaggtttgcggggacggagttttcgattcctgacgagtcggatctggatgatgtgtcgcggcagtggcggaagttggcgggggagacgaatcctgcattgggtcgtcgtctgaattttgggacagtttcggatgagcatgagtcgatgtctgctgccgggtttgctcgggagcggcttggctggtgggatcgtggccagtcggctacgtctcttgttccggcggataagtgggctcagtctgcggtggatgaggcgagtctggttggcgggaaagtgtttggtgtctcgttttctcgttctggggatcgggttgctttggcgggtgccggccggactgatgctggggttcatgttgaggttattgatgggctgtcggggacgattgttgatggtgtgggccggttggctgactggttggcgttgcgttggggtggcacggctcggatcatggttgccggttcgggtgcggtgttgttacagaaggcgttgacggatcgtggtgttccggggcgtggtgtggtggttgctgatactggcgcctatgtggaggcgtgtcaggcgtttcttgagggtgttcgttcgggtgttgtgtctcatcctcgtgccgattcgaggcgtgacatgttggatattgctgtgaggtcggcggttcagaaaaagaaaggctctgcgtggggttggggttcctcgtttaaggatggttctgaggttcctttggaggctgtgtctttggcgtatcttggtgcgaagatggcgaaagcgaagcggcgtgagaggtctggtaggaagcgggtgtctgtggtatgaactcggatgagttggctctgattgagtgcatgtacgatcgtatccaaaggttgtcttcatggcattgtcgcattgagggctactatgagggctctaatcgggtgcgtgatttgggggtggctattcctccggagttgcagcgtgtgcagactgtggtgtcgtggcctggtatagctgtggatgctttggaggagcgtctggattggcttggctggactaatggtgacggctacggtctggatggtgtgtatgctgcgaatcggcttgctacggcgtcgtgtgatgtgcatttggatgcactaatttttgggttgtcgtttgtggctgttatcccccagggggatgggtcggtgttggttcgtccgcagtcaccaaagaattgcacaggccggttttctgccggtgggtctcgtctggatgctggccttgtggtgcagcagacgtgtgatcctgaggttgttgaggctgagcttttgttgcctgatgtgattgttcaggtggagcggcggggtagccgtgggtgggttgagacgggccgtataccgaatgtgttgggtccggttccgttggtgcctgttgtgaatcgtcgccgtacttctaggattgatggccgtccggagattacgaggtctattagggcttacacggatgaggctgtgcgcacactgttggggcagtctgtgaatcgtgatttttatgcgtatcctcagcgttgggtgacgggtgtgtcggctgacgagttttcgcagcctggctgggtcctgtcgatggcttctgtgtgggctgttgataaggatgatgatggtgacactccgaatgtggggtcgtttcctgtcaatagtcccacaccgtattcggatcagatgcggctgttggcgcagttgacggctggggaggctgcggttccggaacgctatttcgggtttatcacgtctaacccacctagtggggaggctttggctgccgaggaatctcggcttgtgaagcgtgctgagcggcgtcaaacgtcgtttggtcagggctggctgtcggttggttttttggctgccggggcgttggattcgagtgttgatgaggccgcgttttttggtgatgttggtttgcgttggcgtgatgcttcgacgcctaccagggcggctacggctgatgctgtgacgaagcttgttggtgccggtattcttccggcggattctcggacggtgttggagatgttggggcttgatgatgtgcaggttgaggctgtgatgcggcatcgtgccgagtcttcggatccgttggcggcgctggctggggctatttctcgtcaaactaacgaggtttgataggcgatggcttcgggggttgtgtcgaggcttgcggcgactgagtatcagcgtgaggcggtcaggtttgccgggaaatacgctgggtattatgccgagctgggtcgtttgtggcgtgccgggaagatgagtgacacgcagtatgtgcgtttgtgtgtggagttggagcgtgccggccatgacggttccgcggcgctggcgggcaaattcgtttcagattttcggaagcttaacggtgtggatcctggtttgattgtgtatgacgagtttgatgctgccgccgcgttggctaggtcgttttcgactatgaagatgatgaatagtgacccggatagggtgaatgatacgattgatgtgatggctgcgggtgttgatcgggctgttatgaatgctggccgtgacacggttgagtggtctgctggtgcgcagggtaggtcgtggcgtcgggttactgatggtgatccgtgtgctttttgtgccatgttggctacgaggtcggattatacgactagggagcgtgcgctaacgacagggcatactcggcgtcacaagcggggcggtaagcgtccgcttggttcgaagtatcatgatcattgtggttgtacggtggttgaggttgttgggcgttgggaaccaaatagggctgatgccgagtatcagcgggtttatgagaaggcccgtgagtgggttgatgatcatgggttgcagcagtcgtctggcaatattttgaaggctatgcgtactgttggcgacatgagatgataggttccggttgtgcaccgccggttatcggtgcacggggttgtctcccgcacgggggtcaacaatgttgtgttgttttccgcaaggagtgtagggttaggctatggccgatcagaatgttgaggaactgaatgttgacaatgatattgtggagtccggaaaggataacggcattgttgatacagtaaaagacgatggcgggcaggaggtagccgacaatcagttgaagaatgaaggcgagggtaaatcgccggggactgattggaaggctgaggctcgtaagtgggagtctcgtgctaaaagtaatttcgccgagttggagaagcttcgcgcctcggatggtgatgcggggtctgtgattgatgatcttcgccgcaagaatgaggaactcgaagaccggattaatgggtttgttcttgagggtgtgaagcgtgaggtggctgccgagtgtggcctgtcgggtgatgcggtcgctttcttgcacggtggcgatcgtgaagcattggtggagtctgctaaggctttgaagggtttgatcgaccatagtggtggtggcgcgggtgtgcgtcgtcttgcggggagtgcccccgttgatgatgttaaacgacgtgagggtgtcgcgtttgtggatgctcttgtcaataattctaggagatgatttgtgatggctgacgattttctttctgcagggaagcttgagcttcctggttctatgattggtgcggttcgtgaccgtgctatcgattctggtgttttggcgaagctttcgccggagcagccgactatttttggccctgtgaagggtgccgtgtttagtggtgttcctagcgctaagattgttggtgagggcgaggttaagccttccgcatcggtggatgtttcggcgtttactgctcagcctatcaaggttgtgactcagcagcgcgtaagcgacgagtttatgtgggctgatgctgattaccgtctgggtgttttgcaggatctgatttcgcccgctttgggtgcttcgattggtcgcgccgtggatctgattgctttccacggtattgatcctgccactgggaagcctgccgcggctgtcaaggtgtcgctggataagacgaagaagacggttgatgccaccgattccgctacggctgatctggtcaaggctgtcggccttatcgctggggctggtttgcaggttcctaacggtgttgctttggatccggcgttctcgtttgccctgtcgactgaggtgtatccgaaggggtctccgcttgccggtcagcctatgtatcctgccgccgggtttgccggtttggataattggcgcggcctgaatgttggtgcttcttcgactgtttctggcgccccggagatgtcgcctgcctctggtgttaaggctattgttggtgatttctcgcgtgttcattggggtttccagcgtaacttcccgatcgaactgatcgagtatggtgacccggatcagactgggcgtgacctgaagggccataatgaggttatggttcgcgccgaggctgtcctgtatgtggctatcgagtcgcttgattcgtttgctgttgtgaaggagaaggctgccccgaagcctaatccgccggccgagaactgattcatttgttgcggtgatatgtacatgtgcagggggtggtgttgatgggtatcattttgaagcctgaggatattgagcctttcgccgatattcctagagagaagcttgaggcgatgattgccgatgtggaggctgtggctgtcagtgtcgccccctgtatcgctaaaccggatttcaaatatagggatgccgctaaggctattctgcgtagggccctgttgcgctggaatgataccggggtttcgggtcaggtgcagtatgagtctgcgggcccgtttgctcagacgacacggtctaatactcccacgaatttgttgtggccttctgagattgctgcgttgaagaagttgtgtgagggtgatggtggggctggtaaagcgttcactatcacccccactattaatggtcgatatgcacattctgaggtgtgttccacggtgtggggtgagggttgctcgtgcgggtcgaatattaacggctacgctggccctttgtgggagatatgatatgaccagttttccttatggtgaaacggttgtgatgcttcaaccgactgttcgtgtcgatgatcttggcgacaaggtggaagactggtctaggcctgtcgagactgggttccataacgtggccatctatgcttccgtttcgcaggaggatgaggccgcggggcgtgactctgactatgagcattggtcgatgctgttcaagcagcctattgtgggtgctgattatcgttgccggtggcgtattcggggtgttgtgtgggaggctgacgggtctcctatggtgtggcatcaccccatgtctggctgggatgctggtacgcaggttaatgtgaagcgcaacaagggctgatgggtagtggctcaggatgttaatgtgaagctgaacttgccgggtattcgtggggtgttgaagtcttctggggtgcaggcgatgttggctgagcgtggcgagcgtgtgaggcgtgcggcctcggcgaatgtgggcggtaatgcttttgatagggcccagtatcgtgcagggttgtcgtcggaggtgcaggttcaccgggttgaggctatggcccgtattggcaccacctataagggtgggaagcgtattgaggcgaagcatggcacgctggcgaggtcgattggggctgcgtcgtgatcgtctacggtgaccccaggaagtgggctaaacgtgtgctcaaggatgatggctggctgtccgatataccgtgtactgggacggtgcctgaccagtttgagggtgaccttatttggttggctcttgatggtggcccacagttgcatgttcgcgagcaggtgtttttgcgggtgaacgtgttttctgatatgccggatcgtgctatgtcgttggcgcgtcgtgttgaggctgtgctggctgacggggttgatggtgatccggtggtgtactgtaaacggtctactggccctgatttgctggttgatggtgcacgttttgatgtgtattcgctgttcgagctgatatgtaggcctgcggagtctgaataagcttattgtttttgttttaatgtaattgtttgatatttaatgggggttatgatggctgcaacacgtaaagcgtctaatgttcgctctgctgttacgggtgacgtctatattggtaaagctcatgccggtgacactattgatggtgtgaagacggttcctgacggtcttaccgctttagggtatctgtctgatgacgggtttaagattaagcctgagcgtaaaacggatgatttgaaggcttggcagaatgcggatgttgttcgcactgtggctacggagtcttctatcgagatttctttccagctgatcgagtctaagaaggaggttatcgaactgttttggcagtcgaaggttactgccggagccgattcgggttcgttcgatatttctcctggtgccacgacgggtgttcaagccctgttgatggatattattgatggcgatcaggttattcgctactatttccctgaggttgagcttgtcgatcgtgacgagattaagggtaagaatggcgaggtgtatgggtatggtgtgacgttgaaggcgtatcctgcccagattaataagaagggtgatgcggtgtctggtcgggggtggatgacggctttaaaagctgatactcctccggttccgccttctccgaagcctcagccggatcctaatcctccgtccgagaactgatacacgattttaggggattgttgatagatgagtgacactggtttcacgttgaagattggtgaccgtagctgggtgttggcggatgcggaggagacggctcaggctgttcctgcccgtgtttttcgccgtgccgctaagattgcccagtcgggggagtctgcggatttcgcccaggttgaggtgatgttttctatgttggaggctgccgccccggctgacgctggggaggctttggaggggcttcctatggttcgtgttgccgagattttccgtcagtggatggaatacaagcctgacggtaagggtgcctccctgggggaatagtttggctccacggcctgattgatgattatcgtggggccatcgaatacgatttccgcaccaagtttggtgtttctgtttatagtgttggtggcccgcagatgtgttggggtgaggctgtccggctggctggcgtgttgtgtaccgatacgtcgagccagttggcggcccacctgaatggttggcagcgcccgtttgagtggtgcgagtgggctgtactggacatgctggatcattacaggtctgctaatagtgaggggcagccggagcctgtggcgaggcctacgggtgagcgtagggcccggtttacgtctgggcaggtggacgatattttggcgcgtgttcgtgccggtggcggggtgtctcgcgagattaatattatggggtgaatggtgtatgtctggtgagattgcttccgcatatgtgtcgttgtatacgaagatgcctggtttgaaggcggatgttggtaaacagctttccggggtgatgcctgctgagggtcagcgttcgggtagtctttttgctagcgggatgaagttggctttgggtggcgccgcaatggtgggtgccatcaatgttgccaaaaagggtttgaagtctatctatgatgtgactatcggtggcggtatagctagggctatggctatcgatgaggcccaagcgaagttgactggtttgggtcacacgtcttctgacacgtcttcgattatgaattcggctattgaggctgtgactggtacttcgtatgcgttgggggatgcggcgtctacggctgcggcgttgtctgcttcgggtgtgaagtctggcggccagatgacggatgtgttgaagactgtcgccgatgtgtcttatatttctggtaagtcgtttcaggatactggcgctatttttacgtctgtgatggctcgcggtaagttgcagggcgatgacatgttgcagcttacgatggtgggtgttcctgtgctgtctttgcttgccaggcagacgggtaaaacgtctgctgaggtgtcgcagatggtgtcgaaggggcagattgattttaacacgtttgcggctgcgatgaagcttggcatgggtggtgctgcgcaggcgtctggtaagacgtttgagggcgctatgaagaatgttaagagcgccctgggctatcttggtgctacggctatggccccgtttcttaacggtttgcggcagatttttgttgcgttgaatccggttatcaagtctatcacggagtctgtgaagcctttgtttgcgtcggtggatcaggggattcagcggatgatgccgtctattttggcgtggattaatcgtatgccggctatgatcactcgaatgaatgcacagatgcgcgccaaggtggagcagttgaagggcatttttgcgagaatgcatttgcctgtccctaaagtaaatcttgctgccatgtttgctggcggcaccgcagtgtttggtattgttgctgccggtgtggggaagcttgttgcagggtttgccccgttggcggtgtcgttgaagaatctactgccgtcgtttggtactttgaagggtgccgctggcgggcttggcggcgtgtttcgcgccctgggtggccctgtcggtattgtgatcgggctgtttgcggcaatgtttgccacgaacgcccagttccgtgccgctgttatgcagcttgtgggggttgttggccgggctttggggcagattatggtcgccattcagccactgttcgggattgttgctggcgtggttgccaggttggctcccgtttttggccagattattggtatggttgctggtttggctgcccggctggtgcctgttattggtatgcttattgcccggctggttcctgttatcacccagattattggcatggtaacccaggttgctgccatgttgttgcctatgctgatgccagttattcaggctgttgttgctgtgatacggcaggttattggtgtgatcatgcagttgatacctgttttgatgccggttgtgcagcagattttgggtgctgtcatgtctgttttgccgccgattgttggtttgatacggtcgctgataccggtgatcatgtcgattatgcgtgtggtggtgccggttgttggtgccgtgctacaggtggtggcacgtattattccggttgttatgccgatttatgtttcggtgattggattcattgccaagatttatgctgcggttatcgtttttgaggctaaggttattggcgctattcttcgtactattacgtggattgtggatcattcagtgtctggcgtgaggtctatgggcacggccatccagaatggctggaatcatatcaaatcgtttacgtcggcgtttattaacggtttcaagtcgatcatttctgccggtgttgccgcggttgtggggttttttgcccggctgggttcttcggttgcctcccatgtgaggtctggttttaacgcggctcgtggcgctgtttcggctgcgatgaacggtattcgtagtgtggtgtcttcggtggcgtccgctgttggcggatttttcgggtcgatgccttctcgggttcgtggtgctgcctcgtccgggtttaacgctgcgaggggtgcggcttcttctgctatgcacgctatgggctcggctgtgtctagtggtgtgcatagtgtgataggttttttccggaatctgcccggcaatattaggggcgccttgggtaacatggggtctctgttggtgtctgctggccgtgatgtggtgtctggtttgggtaatggtatccggaatgctatgagtggcttgttggatacggtgcgtaatatgggttctcaggttgcgaatgcggcgaagtcggtgttgggtattcattccccgtctcgggtgtttcgtgaccaggttggccggcaggttgttgccggtttggctgaggggatcactggtaacgcgggtttggcgttggatgctatgtcgggtgtggcttcgcagcttccggatgcggtggatgcccggtttggtgtgcgatcgtctgtgggctcgtttaccccgtacgaccggtatcggcgtgctcagggtgagagcgttgtggtgaatgtgaatggcccgacgtatggtgatcctgccgagtttgcgaagcggattgagcggcagcagcgtgacgctttgaacgcgttggcttatatgtgagtaaaggggtatgcatgtttattcctgacccgtctgatcgttctggtttgactgggacctggtctatggatccgcggtttggctatgagcgtgtgcttcatttgacggattatacgggtgcgtctccggtcatgttgttgaatgattcgttgcgcggtttgggtgttcctgaggttgagcatttttctcaaactcatgttggtgtgcacggctcggagtggcgcgggtttaatgtgaagcctcgcgaggtgacattaccggtgttggtgtcgggtgttgccgaggatccgccgggcgggtttcgtgacggttttttgaaagcctatgacgcgttgtggtctgcgtttcctcctggcgaggagggtgaactgtcggttaagaccccatctggtgtggagcgggtgttgaagtgtcgttttgattcggctgatgacacgtttactgtggatccggtgaatcgcggctatgcgcgttatgtgcttcatttgacagcctatgacccgttttggtatggggatgagcaaaagtttcgtttcagtaacgctaagttgcaggattggttgggtggcggccctgttggcaaggatggcacggcttttccggttgtgttgacgccgggtgttggttcgggttgggataatctgtctaataagggtgatgtgcctgcgtggcctgtgattcgtgttgagggtcccttgcagtcgtggtctgtgcagattgatggtttgcgtgtgtcttcggactatcctgtcgaggagtttgattggatcactattgacacggatcctcgtaaacagtctgcgttgttgaatgggtttgaggatgtgatggatcgtttgacagagtgggagtttgcgcctattccgcctggcggttctcggagtgtgaatattgagatggttggtttgggtgctattgttgtgtcggtgcagtacaggtttttgagggcttggtgaatggttgatggctggtcttgttccgcatttaacattgtttacacctgattatcgccgtgtggcgcctatcaatttttttgagtcgttgaaactgtcgttgaagtggaatggtttgtccactttggagttggtggtgtcgggtgatcattcgaggcttgacgggttgactaggccgggtgctcggctggttgttgattatggtggtggccagattttttctgggcctgtgcgtcgggttcatggtgtgggtccttggcgttcttcgcgggtgactatcacgtgtgaggatgatattcgcctgttgtggcgtatgctgatgtggcctgtgaattatcgtcctggtttggttggtatggagtggcgtgccgacagggattatgcccactattctggtgcggcagagtcggtggctaagcaggtgttgggggataatgcttggcggtttccgccggatttgtttatggaagatgatgagagtcgtggccgctatattaaggattttcaggcccggtttcatgtgtttgctgacaagttgttgccggtgttgtcgtattatcggatgactgtttcggtgaaccagtttgaggataaggtgaatgatcagcggggtttggtgtttgactgtgtgcctgcggtgactcgtaaacatgtgttgactgccgagtcgggttcgattgtgtcgtgggagtatgtgcgtgacgccccgaaggctacttcggtggttgtgggtggccgcggcgagggtaaggatcggctgttttgcgaggatgttgattcgatggccaaggatgattggtttgatcgtgtcgaggtgtttaaggatgcccgtaacactgattccgagaaggtgcatcttattgatgaggctgagcaggtgttgtccgagttgggggccacgtcggggtttaagatcgagttggctgagtcggatgtgttgcggtttgggccaggcaatctgatgcctggtgatttgatctatgtggatgtgggttctggccctattgcggagattgttcggcagattgatgtggagtgtgtatcgcctggggatggttggacgaaggtgactcctcttgcgggggattatgaggataatccgtcggcgttgttggctcggcgtgtggctggtttggctgcgggtgtgcgggatttgcaaaaattttagtaagtgattggggtttgttgtgggtattgtgtgtaaagggtttgatggtgtgttaaccgagtatgattgggctcaaatgtctggtctgatgggtaatatgccgtccgtgaaaggcccggacgattttcgtgtcggcacgacgattcagggttccacggtgttgtgcgaggtcctgccggggcaggcttgggctcacggggtgatgtgcacgtcgaatgctgttgagacggtgacaggtcagcttccgggcccgggtgagacccgctacgactatgttgtcctgtctcgggattgggagcagaacacggccaagttggagattgttcccggtggccgtgcggagcgtgcccgtgacgtgttgcgtgcggagcctggcgtgtttcatcagcagctgttggctactttggtggtgtcgtctaacgggttacagcagcagcttgacaggcgtgctatagcggctcgtgtggcgtttggggagtctgctgcgtgtgatc

SEQ ID NO: 29 - DNA, 17695 bp, Pahexavirus sp.
  source 1..17695: mol_type = genomic DNA
ttctacgtatgcgtcatccttatcgtagttggagtaatcaaggggtttgagcacgaccgcgttgaacccgtttttggtgcgcacggtggcgagtttgaaagtctgctcctcgccaaggtatgcttctagatcgcggatcatggagtgtgggcggtcgtggttgccgcgtgctttctcgataatggtgttggggatggtttctggggtgccgttgttgagatcctggagggtgtggaagatggtgacatcagcgtagatgcggtctgcggtctgtccaccgtagccttcggtgttgtgttctacgtcgtggattttgaaggcgatggcggtggcgtcctggtttttggacgggttgaagaaggtgctgttgctgttgttgttgcggtagttggcgagtgccatgattgtgttatcctttactgttgtgtctgtttttgttgtcttatattggtttatcgggtgaggctgtttcgtttgtttcggaaagcctcggatacgtcactgttgctggtgatggtcttcttgtactgtttgaggaggtctgctagctgtgctttgcttgttgctttgttgattttgtcgatgacgatatcgttttcttgggatgtgatgttgtctacgtagtttttggctgcctggttgtatcggtcttggaggatgattgatgcgctcgctacgagtgttgcgaggtcccagtctttggacacgttatcgtttttgagtccgcctagcaggtcgatgatggcctgttttgtctgctctgctgtgtctccgcggatgaccgcccatggtgcagcatagtctccaccatatttgagtgtgatcgtgagtcgatcattgtcgatcttgtctttatcggtcatttggtgtccttttctttattgtctgtttggagcggctggacggtggattctaccgggtatctgtacgagtttttgccgttgacggcccagcaggcgtctcgtacggggcatcctttacagagtgttgtgacgtgtgggacgaagatgccttgacttattcctttcattgcttgactgtacatggatgatacatgccggtaggtgttgttgtcaagatcgtagagttcggtggatgtgccttgtgttggggatttatcgtcgttgcggctggtggccggcgtccaaaacatgccttttgtcacatcgttgccgtgttggttgagcatgtaccggtatgtgtgcagctgcatactgtcggcgggtaggcgtccggttttgaggtcgaggatgaaggtttcgccggtgtcggtgtcggtgaaaacgcggtcaatatatccgactatttttgtgtcatcgttcaggatagtttctaccgggtattcgatgcccggctcgccgtcaataacagcgatagcagattctggatggttgcgcctccatgttttccagcggtccacaaaggtggggccgtaaaccatccaccagtcgtagtctttcctgtgtgggcccccgctttcgcacaggtttttgcattgccgcccggagggtttgatttctgtgccttcggattcggcgagggcgacttgggtgtcgaaaatgtttttgaaggatgagagtttgtctggcagtgcagggtattcggcgggattgtacaggtgtaggtcgtattgttcggtgatgtggtgtatggcgcttccggcgatggtggcgtaccaggtgtaatgttgggcgcggtagccgtgttggaggcgccatttttctccgcattcggcccactgtgacagtgatgagtaggagatgtggcctggatggccgatggttttcgggtattgtgctagaggcattacttgtcgcttttgtgggtgttccatgggtttcgggtgtcttggccggcatcgtgttgctggtaggcgaggagtgcgaggcagtgccaggcggcatgggccagatgcggcaaatgtgattcgtggtcgaggttgtttccttgctgccatgaaagtaggtgcctgtagagggcgtcgacactgtggctccacggatagccgccggtccagttgttgtcgccgtatttggtggcaccgtatccggctacttcgccgagggcgtgtaaggctgcggggtcgatgagggatagcctgcaaagtttcaattctttcttggcgccagtatcagggtcggtgtacatgcgggtgggcttatccatgagatgtgtgctccttaggggtgggttactggttggggttgtgggctagggcgacggcgaggataatgatggcgagggtttctgcgatgaggatgggtgttgtgatcatttgttgtttcgggggttgttggtgagtgtggaggcgcctaggagggtggtgagggcgcatgcggcaatgatggcgagggcggctttgtggctggtgccggttgcgtacatccatgtgatgatggcgccctgtatccatgccagtgttgtgaagaacgtttcgtagctgtgcagctcaatgttgttgggtgtgttcatgcttgctcctgaagaatggtgttgatggttttataaatgttgtacaggtctgtttcgatagataacagttggttgatttggtggtcgagatcaatgtctgggttgagggtgttgatgcgggaggcgatgtcggtggctgtgcgtaatgtgccgccggtgtggtgaatgatgtgtgctgtgtcggcgagtcctgtggtgacggcgtagtgggataggagaggcatagcggggatgctccttggcgggttactgttgcgggttgatgttgaggtcggtgacgtgcgggtggtcttctgttccggtgacgaggcagtggactgtgacggatagtttggatgctcccggctggcggacggtggcgccgtagacgatggagaaggtgtctttaccaataattttgtggagttggaggtcgatgtcggggttgccgttccatttgacgccttgcgtggcggccttctgttcggctttgcggttgcaggcgtgagcagcggtgagcatggtgagtccggtggcggtttcttcaccccttgtttgggcttgcttgtgggttttggcttgttctgcttgtagggagcggactgctgcggcctgcttggctgctttctcggctttgcgctgctgggcggtttcaggtgtccatgtggtgttggctgtggtggcctgtggggctgactgtgaggcgagtggcgggttgtcgtcgggtgctggcaggaaagagcatgcggcaataatggcgatagtggcgcctgcgatggtgtagccttttttcttgttcatgactgttgtcccctttccggggtgttgttcgttgctgacatgattaatactttcagcggctgggccctgtgtcaaggctgcgctcaacgattgtgagcgatacttgtgtggctaggggttttgtcatgtaagcgtgacatgtcactaccttgcgtccagtatccatggcggttgcgggccatccctttggcaagcatctcgtccacggtgaggcacctgcggcgattggggccttccttgactccgtggtcgcctgtgcggtgcatgtccccggcataagtgccattaaatgtttcgtggcagattgtgcagtgttctggtcggtatccgatgattgtgctatcgcacttgtggcatgtccattgcatgattggtccttctttcgtgttttaagcttgtgctctgaggattagagcgactttcagcccttgggggtatgattatatgggtcgggtatttctaggcgattctaggctcattgtgtgtggctgggggttatcgggcacacagggtgagtaggtggcccacattgatgcgggtcacgttccagtagagttgcgtggcttcctcactggtgagcggcttccactcgtcatggctgaacacggtgccatcggtggcgatgaacgtgttggggcgtagcttgtggagttcagtctctacatgctgccggtaggcttcggcgaggcccccgaaatcgaggtggtcgcaggagaggttttcgaggcgtgtcaggtcgaaaggctcagggcagtccggggtgggggtgtaaagctgggtgaagtggttggcgatcttctgcatgacgggttcctttctggtgtgtggatggtttttattgtgtggcttctttgaggattgtggcggtgtcgatgtcatcgatgtcccaagcgaggtcttcggcctcgtctggggtgagtggctgccagttgtgtgggccggtgactgatccgtcgagggcgagggtccagtcggggcggaagaggtttaaggcttcttgcacagcatcccggtaggcgtgtttggcggcgtcaaggttgatgtgtttggcgtgtcggccggctagccgggtgaggtcgagtgggtcgtcctctgtttgcccatagagggaggtgatggatggtgtgatgagtgtggtggccatttttggtgtgttcctttcggtggtgtaggggttgttgtggtttctagagtgtgtaggttgcaaccgggagtcaaggtggcgctcattcggattgagcgtttcatgctggagtgtcgggtgtgacagatgtcactcaagcatttactgcctctctcagcgtctcaaatcttctaggggtaggattatgcagggttaaccctgctgatcgattctagggcccttctagggtgtctcaggggtatgtctgggtgatagcgggtgtggcagatgatctagcgagtcaaggtgccgagctgagacataagatctatcatctaggtgtgtgaaatgtatcacactcgcctagtatggtgtgcactctcgaggtcgctctgtcgatctggcgtagagggtgtagcccagaaataccgtttaaagccttcacacggcgcctaggagcgccttgcagggtgggggctaggtatttatacccccaagcaattctgatcgattctagacgcctccaggagactgatacgcgatcaaccatctcggcatagatcatcaacccctatcctggctagctaagcctcaactatgtggacagtgtgggatactgtggggggaagaaggacacggtaaaagaaagaagggggatcatcagccttcacaccttcaagccttagggtcttagcagttagcaccgagcccctcaagggctcggcatcagtctcatcgggctcagctcatcaggcacagccctgaaaggggtacacgccatcagggaaggcgtaagagtacgaggagcctcagcgacgagtactcgaaagcctgagggaagaccatcagcactgatgggcctagcgtgttcggaaaggacacaagagtaaagtgtgacagctgtccgggagtgaaacccgttccggctaggggtttcagccttaaccacctgtcaaggttacaagactctaagaaaatttaaggaaaagtttaggtctaatttttggacctttaccaccaaaaacacccgtttacacccctcaaacccgcctatagagccaaaaccaccagtttgactcatcccaggtggggtatgataggctggacaggtagccagctggacgcaaggccgaaatccgctgacgcggctttcacccttacatccatcagtctaccaaagacttaaagacctaagggcttagcgctaaggtgctgatagcttaacaccgagccccctcaagggctcggcatcagtcttaaagccttaaacacttaaagtacatataaaaccttaaagacttagcacttaaagttaattaataaccttaaaggcttacacacttaacaccgagccccctcaagggctcggcatcagtcttaggtacttaaggatctaagttactataaaagttttaaagtcttaaagtaactataaaaccttaaaggcttagcacttaaggatataaacttaacatcagtgtttaagacttaaagagttaaaataaccataaagctttaaacacttaaagtaactataagactttaaagaccttaagtacttaaagttaaccatcagtcttaaactttaatattataacctataagtcttaaagcttataggttataaaagttttagaagagctaaggggttaacttctttacttctctactctctttggttcttctctcttctcttcttttcttcatcaggggagaagaggaacctttaccgtcaacgctgacagacttttcaccgtgtgtctcgtgtaccaccggtcgcacgctcccggtttgtacactccccacactctacctgtgtccctttacggcttagcgtgttcggctgaaggcgtacggcgtgtcacgctcacacccttaacactaggtaagacttaaagtgtatattatatgtagaagactttaaaaacctctaaggtgttcccgcttagcctgtgttctacaccgctaggcgccaagtgctaggccttgaagcgcgaacacacacccaccccccatttttcttccgtgtccttcttcttttgacaccgctggggggcgatgtgatctttttcacatgccagggggtgtgaggggaaaacaaacaccccagcacaaacagaacaccccctcaaacgaacaaaacgccccccataatcgaacagcagggcatcggtagggtattcatacccccagacgattccaggccgttacaggggcaaataagacccgtacagggctaggcgaggaacagacacattatggcacgcaccaaccgcacagccagccaagcccaccggcgctggcgggcaagactcatcacccaagcacgcaagcaaggccaaaccgaatgcccactctgcggagcccagatagcctgggacacacatgacctgccaaccagccccgaagccgaccacatcacacccgtcagccggggaggactcaacaccctcgacaacgggcaaatcatctgcagaacatgcaacagaagcaaaggcaatcgcagcgaaccaaacattagtttccaacaacaaaccacaaaaaaccttgtttcatggtgaaaaacccgccaacccccgacgggcacaccccctgcacgcccgtgcaagacctcgtacggcttagtgaaatacctcccttttgtggatttgtctgtttgtcgactttttgtgttggtggtgagtgttgtgcagcctgagcttcctggtagtcgtgagtggtgtggggagacgcgtcgttggtggggtgtgtggggtgaggatagtcgcgcgcagtacgtgtctgatgaggagtggctgtttctcatggatgctgcggtgattcatgattgtgtgtggcgtgagggtcgcgcggatttggtggcttcgcttcgtgctcatgtgaaggcgtttatgggtatgttggatcggtattcggttgatgtggtgtctggtggccgtggtgagggttctgcggtggcgatgattgaccggtataggaagcgtaggggtgcttgatgtctcaggttgtgggttctcaggttcctcgtcaccgggtggctgcggcgtattcggtgtctgctggcggtgatgctggggagttgggtcgtgcgtatgggttgacgcctgatccgtggcagcagcaggtgttggatgattggttggctgtcggtagcaatggcaggcttgcttcgggtgtgtgtggggtgtttgtgcctcgccagaatggcaagaatgctattttggagattgtggagttgtttaaggcgactattcagggtcgccgtattttgcatactgcccacgagttgaagtcggctcgtaaggcgtttatgcggttgaggtcgttttttgagaatgagcggcagtttcctgacttgtatcgtatggtgaagtcgattcgtgcgacgaatggccaggaggctattgtgttgcatcatccggattgtccgacttttgagaagaagtgtggttgtccgggttggggttctgtcgagtttgtggcccgttctcgtggttctgctcgcgggtttacggttaatgatttggtgtgtgatgaggctcaggagttgtcggatgagcagttggaggctttgcttcctacggtgagtgctgccccgtctggtgatccgcagcagattttccttggcacgccgcctgggccgttggcggatggttcggttgtgttgcgtttgcgtgggcaggctttgtcgggtggtaaaaggtttgcgtggacggagttttcgattcctgacgagtctgatccggatgatgtgtcacgccagtggcggaagttggctggtgacaccaatccggcgttgggtcgtcgcctgaattttgggaccgtgagcgatgagcatgagtcgatgtctgctgccgggtttgctcgggagcggcttggctggtgggatcgtggccagtctgctacgtctgtgataccggcggataagtggtctcagtctgctgtggatgaggcgagtctggttggtgggaaagtgtttggtgtctcgttttctcgttctggggatcgggttgctttggcgggtgccggccggactgatgctggggttcatgttgaggttattgatgggttgtcggggacgattgttgatggtgtgggccggttggctgactggttggcggttcgttggggtgacacggaaaagatcatggttgccggttcgggtgctgtgcttttgcagaaggctttaagtgatcgtggtgttacgggccgtggcgtggtggttgctgatactggcacctatgtggaggcgtgtcaagccttcttggaaggtgtaaggtctggtgtggtttctcaccctagggctgattcgaggcgtgacatgttggagattgctgtgaggtcggctgtgcagaagaagaagggttctgcgtggggttggggttcctcgtttaaggatggttctgaggtgcctttggaggctgtgtctttggcgtttttgggggctaaacgtgttcgtcgtggccgtcgggagcgtagtggtaggaagcgggtgtctgtggtatgagctcggatgagttggctctgattgagggcatgtttgatcgtatccaaaggttgtcttcgtggcattgtcgtattgagggctactatgagggctctaatcgggtgcgtgatttgggggtggctattcctccggagttgcagcgtgtgcagactgtggtgtcgtggcctgggatagctgtggatgctttggaggagcgtctggattggcttggctggactaatggtgacggctacggtttggatggtgtgtatgctgcgaatcggcttgctacggcgtcgtgtgatgtgcatttggatgcactagtttttgggttgtcgtttgtggctgttatcccccagggggatgggtcggtgttggttcgtccgcagtcaccaaagaattgcacaggccggttttctgccggtgggtctcgtctggatgctggccttgtggtgcagcagacgtgtgatcctgaggtggttgaggcggagttgttgctgcctgatgtgattgttcgggtggagcggcgtgggtctcgtgaatgggttgagacgggccgtataccgaatgtgcttggggcggttccgttggtgccgattgtgaatcgtcgccgtacttctaggattgatgggcgttcggagattacgaggtctattagggcttacacggatgaggctgttcgcacactgttggggcagtctgtgaatcgtgatttttatgcgtatcctcagcgttgggtgacgggtgtttcggctgacgagttttcgcagcctggctgggtgttgtctatggcttctgtgtgggctgtggataaggatgatgatggggacactccgaatgtggggtcgtttccggttaattctcctactccgtattcggatcagatgcgcttattggctcagttgactgcgggtgaggctgctgttccggagcgctatttcgggtttatcacgtctaacccgccttctggggaggctttggctgcggaggagcctcggcttgtgaagcgtgctgaacgcaggcagacgtcgtttggtcagggctggctgtcggttggttttttggctgcccgggcgttggattcgagtgttgatgaggccgcgttttttggtgatgttggtttgcgttggcgttatgcttcgacgcctaccagggcggctacggctgatgctgtgacgaagcttgttggtgccggtattcttccggcggattctcggacggtgttggagatgttgggtttggacgatgtgcaggttgaggctgtgatgcggcatcgtgccgagtcttcggatccgttggcggcgctggctggggctatatcgcgtcgaactaacgaggtttgataggcgatggcttcgggggttgtgtcgaggcttgcggcgactgagtatcagcgtgaggcggtcaggtttgccgggaaatacgctgggtattatgccgagctgggtcgtttgtggcgtgccgggaagatgagtgacacgcagtatgttcgtttgtgtgtggagttggagcgtgccggccatgatggttcggcatcgttggctgccaggtttgtgtcggattttcgccggttgaatggtgtggatccgggtctgattgtgtatgacgagtttgatgctgcggcggctttggcgaggtcgttttcgactatgaagattcttgagagtgacccggatagggcgaatgatactattgatgcgatggctgcgggtgttaatcgggctgtgatgaatgctggccgtgacacggttgagtggtctgcgggtgcgcagggtaggtcgtggcgcagggtgactgatggtgatccgtgcgcgttttgtgccatgttggctacgaggtctgattatacgaccaaagagcgggcgcttactactggtcatacgcggcgtcataagcgtgccggtaggcgtccgtttggttcgaagtatcatgatcattgtggttgtacggtggttgaggttgttgggcgttgggagccgaatagggctgatgccgcatatcagaggacgtatgagaaggctcgtgagtgggttgatgatcatgggttgcagcaatcgcctggcaatattttgaaggctatgcgtactgttggcgacatgagatgatggtttccggttgtgtgccgccggttatcggtgcacagggttgtctcccgcacgggggtcaacaatgttgtgttgttttccgcaaggagtgttaggttaggctatggccgatcaaaacgttggagaacagaatgttgacaatgatgctgttgagcccggaaagggtggagacattgttgatgttgtgaaggatgggcaggctgccggcgatgatcatgccggtgatgtttccgtgaagggtgaggcttctggggcgtctggcacggattggaaggctgaggcccgtaagtgggagtctcgtgctaaaagtaatttcgccgagttggagaagcttcgtgcctcggatggtgatgcggggtctgtgattgatgatcttcgccgcaagaatgaggaactcgaagaccggatcaacgggtttgttcttgagggtgtgaagcgcgaggtggctgccgagtgtggcctgtcgggtgatgctgtcgctttcttgcacggcgacgaccgtgaagcactggtggagtctgcgaaagctttgaagggtttgatcgaccatagtagtggtggcgcgggtgtgcgccgtcttgcggggagtgcccccgttgatgatgttaaacggcgtgagggtgtcgcgtttgtggatgctcttgtcaataattctaggagatgatttgtgatggctgacgattttctttctgcagggaagcttgagcttcctggttctatgattggtgcggttcgtgaccgtgctatcgattctggtgttttggcgaagctttcgccggagcagccgactatttttggccctgttaagggtgccgttttttctggtgttcctcgcgccaagattgttggcgagggtgaggttaagccttccgcttcggttgatgtttcggcgtttactgcgcagcctaccaaggttgtgactcagcagcgtgtctcggacgagtttatgtgggctgacgccgattaccgtctgggtgtgcttcaggatctgatttcgcctgctcttggtgcttcgattggtcgcgctgttgatctgattgctttccatggtgttgatcctgctacgggtgagcctgccgctgctgtccaggtgtcgctggataagacgaagaatgttgttgatgccacggattctgccacgactgatcttgtgaaggctgtcggtcttatcgctggtgctggtttgcaggttcctaacggtgttgctttggatccggcgttctcgtttgccctgtctactgaggtgtatccgaaggggtctccgcttgctggtcagccgatgtatcctgccgccgggtttgccggtttggataattggcgtggcctgaatgttggtgcttcttcgactgtttcgggtgccccggagatgtcgcctgcctctggtgttaaggctattgttggtgatttctcgcgtgttcattgggggttccagcgtaacttcccgatcgaactgatcgagtatggtgacccggatcagactggccgtgacctgaagggacataatgaggttatggttcgtgccgaggctgtcctgtatgtggctatcgagtcgcttgattcgtttgctgttgtgaaggagaaggctgcaccgactcctcctccggccccgaagcctgagcctaatcctccggctggtaactgatacaagataagcgaatgtgtactgtgtgcagggggtggtgttgatgggtatcattttgaagcctgaggatattgagcctttcgccgatattcctgaagggaagcttgaggcgatgatcgccgatgtggaggctgtggctatcagtgtcgccccctgtatcgctagaccggatttcaaatacaaggatgccgctaaggctattctgcgtagggctttgttgcgctggaatgataccggggtttcgggtcaggtgcagtatgagtctgcgggtcctttcgctcagactacacggtctaatactcccacgaatttgttgtggccttctgagattgccgcgttgaagaagctgtgtgagggtgatagtggggctggtaaagcgttcactatcacaccgaccttgaggggtggcgtgaatcattctgatgtgtgttccacggtgtggggtgagggttgctcgtgcggatctgatattaacggctacgctggccctttgtgggagatatgatatgaccagttttccttacggtgaaacggttgtgatgcttcaaccgactgttcgtgtcgatgatcttggcaacaaggtggaagactggtctaagcctgtcgagactgtgtaccataacgtggccatctatgcttcgttgtcgcaggaggatgaggccgcggggcgtgactctgattatgagcattggtcgatgctttttaagcagcctgttgtgggtgccggttatcgttgccggtggcgtattcggggtgttgtgtgggaggctgacgggtctcctatcgtgtggcatcatccgatgtccggttgggatgctggtacgcagatcaatgtgaagcgtaagaagggctgctagattgtggctcaggatgtgaatgtgaagctgaacttgccgggtattcgtgaggtgttgaagtcttctggggtgcagtcgatgttggctgagcgtggtgagcgtgtcaagcgtgcggcctcggcgaatgtgggcggtaacgctttcgataaggcccagtatcgtgcagggttatcatcggaggttcaggttcaccgtgttgaggctgtcgccaggattggtaccacctataagggtggtaaaaggattgaggcgaagcatggcacgttggcgaggtcgattggggctgcgtcgtgatcgtttacggtgaccccaggaagtgggctaaacgcgtgctcaaggatgatggctggttgtccgatataccttgtgtggggacggtgccggacgatttcagcggtgatttgatttggttggcgttggatggtggcccgcagtggcatgtgcgtgagcaggtttttttgcgggtgaatgtgttttcggatacgccggatagggctatgtctttggcgcgtcgtgttgaggctgtgctggctgatggtgtggatggtgatccggtggtgttttgtaggcgttctactggtcctgatttgctggttgatggtgcacgttttgatgtgtattcgctttttgagctgatatgcaggcctgtcgaatccgagtaaacgttttgttttgatattgttgtttgttttttgtttgatattgtttttgggggttatgatggctgcaacacgtaaagcgtctaatgttcgctctgctgttacgggtgacgtctatattggtaaagctcatgccggtgacactattgatggtgtgaagacggttcctgacggtcttaccgctttagggtacctgtctgatgacgggtttaagattaagcctgagcgtaaaacggatgatttgaaggcttggcagaatgcggatgttgttcgcactgtggccaccgagtcttctatcgagatttcttttcagctgatcgagtctaagaaggaggttatcgaactgttttggcagtcgaatgttactgccggagccgattcgggttcgttcgatatttctccgggtgccacgacgggtgttcatgccctgttgatggatattgtggatggcgatcaggttattcgctactatttccctgaggttgagcttgtccatcgtgacgagattaagggtaagaatggcgaggtgtacgggtatggtgtgacgttgaaggcgtatcctgcccagattaaccataagggtgatgcggtgtctggtcgggggtggatgacggctttaaaagctgatactcctccggttcctccttctccgaagcctcagccggatccgaatccgccgtctaataactgatacacatagtttgagggattgttgatagatgagtgacacaggttacgcgttgaagattggtgaccgtagctgggtgctggcggatgcggaggaaacagcgcaggctgttcctgcccgcgtttttcgccgtgccgccaggattgcccagtcgggtgagtctgcggatttcgctcaggttgaggtgttgttttctatgttggaggctgccgccccggctgatgctgtggaggccctggaggggcttcctatggttcgtgttgccgagattttccgtgagtggatggaatataagcctgacggtaagggtgccacgctgggggaatagtttggctccacggcctgattgatgattatcgtggggccatcgaatacgatttccgcaccaagtttggtgtttctgtttatagtgttggtggcccgcagatgtgttggggtgaggctgtccggctggctggcgtgttgtgtaccgatacgtctagccagttggcggcccacctgaatggttggcagcgcccgtttgagtggtgtgagtgggctgtgttggacatgctggatcattacaggtctgctaatagtgagggacagccggggcctgtggcgaggcctacggatgagcgtagggcccggtttacgtctgggcaggtggacgatattttggcgcgtgttcgtgccggtggcggggtgtctcgcgagattaatattatggggtgaatagtgtatgtctggtgagattgcttccgcatatgtgtctttgtatacgaagatgcctggccttaaaagtgatgttggtaaacagttgtcgggtgttatgcctgctgagggtcagcgttcgggtggtctgtttgctaagggcatgaagttggcgcttggtggtgcggcgatgatgggtgccatcaatgttgctaagaagggcctcaagtctatctatgatgtgactattggtggcggtatagctagggcgatggctattgatgaggctcgggctaaactgactggtttgggtcacacgtcttctgacacgtcttcgattatgaattcggctattgaggctgtgactggtacgtcgtatgcgttgggtgatgcggcgtctacggctgcggcgttgtctgcttcgggtgtgaagtctggcgggcagatgacggatgtgttgaagactgtcgccgatgtgtcttatatttctggtaagtcgtttcaggatacgggcgctatttttacgtctgtgatggctcgcggtaagttgcagggcgatgacatgttgcagcttacgatggcgggtgttcctgtgctgtctttgcttgccaggcagacgggtaaaacgtctgctgaggtgtcgcagatggtgtcgaaggggcagattgattttgccacgtttgcggctgcgatgaagcttggtatgggtcgtgctgcgcaggcgtctggtaagacgtttgagggcgctatgaagaatgttaagagcgccctgggttatttgggtgctacggctatggcgccgtttcttaacggcctgcggcagatttttgttgcgttgaatccggtgattaagtctatcacggagtctgtgaagcccctgtttgcgtcggtggatcaggggattcagcggatgatgccgtctattttggcgtggattaatcggatgccggctatgatcacacgaatgaatgcacagatgcgcgccaaggcggagcagttgaagggcatttttgcgaggctgcatttgcctgtccctaaagtgaatttggctgccatgtttgctggcggcaccgcagtgtttggtattgttgctgccggtgtggggaaacttgttgcagggtttgccccgttggcggttgcgttgaagaatctactgccgtcgtttggtgctttgaagggtgccgccgtggggcttggtagcgtgtttcgcgccctgggtggccctgtcgggattgtgatcggcttgtttgcggcaatgtttgctacgaacgcccagtttcgtggcgcggttatgcagcttgtgggggttgttggtcaggctttggggcagattatggccggtattcagccgttgtttggtttggttgcggggctggtggcccggttggcgccagtgtttggccagattatcggtttggtggctggtgtggctgcccagattgtgcctgtgattggtatgctggtggcccggctggttcctgtgatcacgcagattataggtgcggtgacgcaggtggcggccatgttgttgccggcgttgatgccggtgttgcaggctgttgttgctgtgatacggcaggttgttggtgtgatcatgcagttggtgcctgttttgatgcctgtgattcaacagattttgggtgctgtcatgtctgttctgccgccgattattggtttgatccggtcgctgataccggtcatcatgtcgattatgcgtgtggtggtgcaggttgtttcggttgtgttgcaggtggtggcccgtattattccggttgtgatgccgattgtgacggctgtgatcgggtttgttgcacgtattcttggcgctattgtgtctgctgcagcccggattattggtactgttgcccgtgttgttggatgggttgtgggccatttggtgtctggtgtggcgcgtatgggtacggccatcttgaatggttggaatcatattagagcgtttacgtctgcgtttattagcggtttcaagtcggttatttctggcggtgtgaacgcggttgtggggttttttgcccggctgggttcttctgttgcctcccatgtgaggtctggttttaacccggcccgtggtgctgtttcttctgcgatgaatgctatccgtagtgttgtgtcttcggtggcgtctgctgttggcgggtttttcagttcgatggcgtctagggttcgtagtgg

SEQ ID NO: 30 - DNA, 17547 bp, Pahexavirus sp.
  source 1..17547: mol_type = genomic DNA
tttatgcggttgaggtcgttttttgagaatgagcggcagtttcctgacctgtttcgtatggtgaagtcgattcgtgcgacgaatggtcaggaggctattgtgttgcatcatccggattgtgccacgtttgagcgtaagtgtggctgtccgggttggggttcggttgagtttgtggcccgttcgaggggttctgctcgcgggtttacggttgatgatttggtgtgtgatgaggctcaggagttgtcggatgagcagttggaggctttgcttcctacggtgagcgcggctccttcgggtgatcctcagcagatttttttgggtacgccgcctgggccgttggctgatgggtctgtggtgttgcgtttgcgtgggcaggctttgtcgggtggtaagaggtttgcgtggacggagttttcgattcctgacgagtctgatccggaggatgtgtcgcggcagtggcggaagttggcgggggatacgaatccggcgttggggcggcgcctgaatttcgggacggtgagcgatgagcatgagtcgatgtctgctgccgggtttgctcgggagcggcttggctggtgggatcgtggccagtctgcttcgtcggtgataccggctgataagtgggatcagtcggctgtggatgaggcgagtctggttggcgggaaagtgtttggtgtctcgttttctcgctcgggggatcgtgtcgcgttggcgggtgcgggccggactgatgctggggttcatgttgaggttattgatgggctgtcgggaacgattgttgatggtgtgggccggttggctgactggttggcggttcgttggggtgatactgaccggattatggttgccaggtctggtgcggtgttgttgcagaaggcgttgacgggtcgtggtattccgggccgtggcgtgattgtggctgatactggtgtgtatgtggaggcttgtcaggcgtttttggaggctattcgttccgggaatgtttctcatcctcgtgttgattctcgccgtgacatgttggagattgctgtgaagtcggcggttcagaagcgtaagggttcagcttgggggtggggttccacgtttaaggatggttctgaggttcctttggaggctgtgtcgctggcgtatcttggtgcgaaaacagttaaagtgaagcggcgtgaacggtctggtaggatgcgggtgtctgtggtatgaatgtggacgagttggctctgattgagggcatgtacgatcgtattcaaaggttgtcttcgtggcattgccgtattgagggctactatgagggctctagccgggtgcgtgatttgggggtggctattcctccggagttgcagcgtgtgcagactgtggtgtcgtggcctgggactgcggtggatgctttggaggagcggctggattggctgggctggacgaatggtgacggctacggcctggatggtgtgtatgctgcgaatcggcttgctacggcgtcgtgtgacgtccaccttgatgcgctgatttttgggttgtcgtttgtggctgttatcccccaagatgatgggtcggtgttggttcgtccgcagtcacccaagaattgtactggccggttttctgccgatgggtctcgtttggatgctggccttgtggtgcagcagacgtgtgatcctgaggttgttgaggctgagcttttgttgcctgatgtgattgttcaggtggagcagcggggtagccgtgggtgggttgagacgggccgtataccgaatgtgttgggtgcggttccgttggtgcctgttgtgaatcgtcgccgtacttcgaggattgatgggcgttcggagatcactcggtcgattagggcttacacggatgaggctgtgcgcacactgttgggccagtctgtgaatcgtgacttctacgcctatccgcaaaggtgggttacgggtgtgtcggctgacgagttttcgcagcctggctgggttctgtcgatggcttctgtgtgggctgtggataaggatgacgatggcgataccccgaatgtggggtcgtttcctgtgaattctcctacaccgtattcggatcagatgcgtttgttggcgcagttgacggctggggaggctgcggtgcctgaacgctatttcgggtttatcacgtctaacccacctagtggggaggctttggctgccgaggaatctcggcttgtgaagcgtgctgagcggcgtcaaacgtcgtttggtcagggctggctgtcggttggtttcttggctgctaaggcgttggattctcgtgttgatgaggccgatttttttggtgatgttggtttgcgttggcgtgatgcctcaaccccgactcgggcggctacggcggatgctgtgacgaagcttgttggtgccggtattttgcctgctgattctcggacggtgttggagatgttggggcttgatgatgtgcaggttgaggctgtgatgcggcatcgtgctgagtcgtctgacccgttggctgcgctggctggggctatatcgcgtcaaactaacgaggtatgataggtgatggcttctggggttgcgtcgaggcttgctgcgactgagtatcagcgtgaggcggtcaggtttgctgggaagtatgcgggctattatgctgagcttggtcgtttgtggcattccgggaagatgacagatgcgcagtatgttcgtttgtgtgtggagttggagcgtgccggccatgatggttcggcatcgttggctgccaggtttgtgtcggattttcgacggttgaatggtgtggatcctggtttgattgtgtatgacgagtttgatgctgcggcggctttggctaggtcgttttcgactatgaagattatgaatagtgacccggatagggcgaatgatactattgatgctatggcggcgggtgttaatcgggctgtcatgaatgctggccgtgacacggttgagtggtctgcgggtgcgcagggtaggtcgtggcgcagggtgacggatggtgatccgtgtgctttttgtgccatgttggctacgaggtcggattatacgactaaggaaagggcacttacttcgggtcatactcggcgtcataagcgtggtggtaagcgtccgtttggttcgaagtatcatgatcattgtggttgtacggtggttgaggttgttggcccttgggagccaaatagggctgatgccgagtatcagaagacgtatgagaaggctcgtgagtgggttgatgatcatgggttgcagcagacgcctggcaatattttgaaggctatgcgtaccgttggcgatatgcgataatttgatgtggtttccggttgtgcgctgccggttatcggtgcacagggttgtctcccgcacgggggtcaacaatgttgtgttgttttccgcaaggagtgttaggttaggctatggccgatcagagtgttgaggaacagaatgttgacaatgatgttgtggagtccggaaaggataacggcattgttgatacagtaaaagacgatggcgggcaggaggtagccgacaatcagttgaagaatgaaggcgagggtaaatcgccggggactgattggaaggcggaggcccgtaagtgggagtctcgtgctaaaagtaatttcgccgagttggagaagcttcgtacatcgagtgacgattctggatctactattgatgagcttcgccgcaagaatgaggaactcgaagacaggattaacgggtttgttcttgagggtgtgaagcgcgaggtggcttcagagtgtggcctgtcgggtgatgctgtcgctttcttgcacggtagtgatcgtgaagcactggtggagtctgctaaggcgttgaagggtttgatcgaccatagtagtggtggcgcgggtgtgcgccgtcttgcggggagtgcccccgttgatgatgttaaacgacgtgagggtgtcgcgtttgtggatgctcttgtcaataattctaggagatgatttctgatggctgacgattttctttctgcagggaagcttgagcttcctggttctatgattggtgcggttcgtgaccgtgctatcgattctggtgttttggcgaagctttcgccggagcagccgactatttttggccctgttaagggtgtcgtgtttagtggtgttcctcgcgtcaagattgttggtgagggtgaggttaagccttccgcgtctgttgatgtttcggcgtttactgcgcagcctatcaaggttgtggctcagcagcgtgtctcggacgagtttatgtgggctgatgctgattaccgtctgggtgttttgcaggatctgatttccccggctcttggtgcttctattggtcgcgccgtggatctgattgctttccacggtattgatcctgctacgggtaagcctgctgctgctgttaaggtgtcgctggataagacgaagaagacggttgatgccaccgatagcgctacgaccgatcttgttaaggctgttggtctgattgctggcgcgggtttgcaggttcctaatggtgttgctttggatccggcgttctcgtttgccctgtctactgaggtgtatccgaaggggtctccgcttgccggccagcctatgtatcctgccgccgggtttgctggtttggataattggcgtggcttgaatgttggtgcttcttcgactgtttcggatgccccggagatgtcgcctgcttctggtgtgaaggctattgttggtgatttctcccgtgttcattggggtttccagcgtaacttcccgatcgaactgatcgagtatggtgacccggatcagactgggcgtgatttgaagggccataatgaggttatggttcgtgccgaggcggttctgtatgtggctatcgagtcgcttgattcgtttgctgttgtgaaggagaaggctgcaccgactcctcctccggctggtaactgataaaagataagcgaatgtgtactatgtgcagggggtggtgttgatgggtatcattttgaagcctgaggatattgagcctttcgccgatattcctaaagataagcttgaggcgatgattgccgatgtggaggctgtggctgtcagtgtcgccccctgtatcgctaaaccggatttcaaatacaaggatgccactaaggctattctgcgtagggctttgttgcgctggaatgataccggggtttcgggtcaggtgcagtatgagtctgcgggtcctttcgctcagactacacggtctaatactcccacgaatttgttgtggccttctgagattgccgcgttgaagaagttgtgtgagggtgatggtggggctggtaaagcgttcactattacaccgaccatgaggagtagtgtgaatcattctgaggtgtgttccacggtgtggggtgagggttgctcgtgcgggtcggatattaacggctgcgatggccctttgtgggagatatgatatgaccagttttccttatggtgaaacggttgtgatgcttcaaccgactgttcgtgtcgatgatcttggtgacaaggtggaagactggtctaagcctgtcgaaaccgtgtaccataacgtggccgtctattctactgtgtcgcaggaggatgaggccgcggggcgtgactctgactatgagcattggtcgatgcttttcaagcagtctgttgtgggtgctgattatcgttgcaggtggcgtatccggggtgttgtgtgggaggctgacgggtctcctatggtgtggcatcatccgatgtctggctgggatgcgggcacgcagattaaagttaagcgtaagaagggctgatgggtagtggctcaggatgtgaatgtgaagctgaacttgccgggtattcgtgaggtgttgaagtcttctggggtgcagggcatgttggctgagcgtggcgagcgcgtcaagcgtgcggcctcggcgaatgtgggcggtaacgctttcgatagggcccaataccgtaatggtttgtcgtcggaggtgcaggttcaccgtgttgaggctgtggcgaggattggcaccacctataagggtgggaagcgtattgaggcgaagcatggcacgctggcgaggtcgattggggctgcgtcgtgatcgtttacggtgtcccaagagtctgggctaaacgcgtgctcaaggatgatagctggctgtctgggataccatgcaccgggacagtgccggatagctttgagggtgaccttatttggttggctcttgatggtggcccacagttgcatgttcgcgagcaggtgcttttgcgcgtgaatgttttctcggatacgcctgatcgtgctatgagcctgtcgaggcgtgttgaggctgtccttgttgacggggttgatggtgatcctgtggtgtactgtaaacggtctactggtcctgatttgctggttgatggtgcacgttttgatgtgtattcgctttttgagctgatatgtaggcctgccgaatccgagtaagcgtatcgttgtttttgttttaatgtaattgtttgatattgtttttgggggttgtgatggctgcaacacgtaaagcgtttaatgttcgctctgctgttactggcgatgtttatattggtgacgcgcacgcgggtgatactattaagggtgtggaggcggttcctgatgggcttaccgctttagggtatctgtcggatgacgggtttaagattaagccggagcgtaaaacggatgatttgaaggcttggcagaatgcggatgttgttcgcacggttgctaccgagtcgtctatcgagatttctttccagctgatcgaatcgaagaaagaggtcatcgagctgttttggcagtcgaaggttactgccggagccgattcgggttcgttcgatatttcaccaggcgccactacgggtgttcacgccctgttgatggacattattgatggcgatcaggttattcgctactatttccctgaggttgagcttatcgatcgtgacgagattaagggtaagaatggcgaggtgtacgggtatggtgtgacgttgaaggcgtatcctgcccagattaataagactggtaatgcggtgtcgggttgggggtggatgacggctttaaaagctgatactcctccttctccgaagcctcagccggatccgaatccgccgtctgagaactgatacacgattttagggattgttgatagatgagtgacactggttatacgttgaagattggtgaccgtagctgggtgttggcggatgcggaggagacggctcaggctgttcctgcccgtgtttttcgccgtgccgctaagattgcccagtcgggggagtctgcggatttcgcccaggttgaggtgatgttttctatgttggaggctgccgccccggctgacgctgtggaggctttgggggggcttcctatggttcgtgtggcggaggttttccgtgagtggatggaatataagcctgaaggtaagggtgcctcgctgggggaatagtttggctccacggcctgattgatgattatcgtggggccatcgaatacgatttccgcaccaagtttggtgtttctgtttatagtgttggtggcccgcagatgtgttggggtgaggctgtccggctggctggcgtgttgtgtaccgatacgtctagccagttggcggcccacctgaatggttggcagcgcccgtttgagtggtgcgagtgggctgtactggacatgctggatcattacaggtctgctaatagtgaggggcagccggagcctgtggcgaggccgacggatgagcgcagggcggggtttacgtctgggcaggtggacgatattttggcgcgtgtccgcgctagtggcggggtgtctcgcgagattgatgtgttggggtgaatagtgtatgtctggtgagattgcttccgcatatgtgtcgttgtatacgaagatgcctggtttgaaggcggatgttggtaaacagctttctggggtgatgcctgctgagggtcagcgttcgggtagtctttttgctaagggcatgaagttggcgcttggtggtgccgcaatggtgggcgctatcaatgttgctaagaagggcctcaagtctatctatgatgtgactattggtggcggtattgctcgcgctatggctattgatgaggctcaggctaaactgactggtttgggtcatacgtcttctgacacgtcttcgattatgaattcggctattgaggctgtgactggtacgtcgtatgcgttgggtgatgcggcgtctacggctgcggcgttgtctgcttcgggtgtgaagtctggcgggcagatgacggatgtgttgaagactgtcgccgatgtgtcttatatttctggtaagtcgtttcaggatactggcgctatttttacgtctgtgatggcccgcggtaagttgcagggcgatgacatgttgcagcttacgatggctggtgttcctgtcctgtctttgcttgccaggcagacgggtaaaacgtcggctgaggtgtcgcagatggtgtcgaaggggcagattgattttgccacgtttgcggctgcgatgaagcttggcatgggtggtgctgcgcaggcgtctggtaagacgtttgagggcgctatgaagaatgttaagagcgccctgggttatttgggtgctacggctatggcgccgtttcttaacggcctgcggcagattattgttgcgttgaatccggtgattaagtctatcacggagtctgtgaagcccctgtttgcgtcggtggatcaggggattcagcggatgatgccgtctattttggcgtggattaaccgtatgccgggcatgatcactcgaatgaatgcacagatgcgcgccaaggtggagcagctgaagggcatttttgcgagaatgcatttgcctgtccctaaagtgaatttgggtgccatgtttgcgggtggcacggctgtgtttggtattgttgctgcgggggttgggaagcttgttgcagggtttgccccgctggcggtgtcgttgaagagtctgttgccgtcgtttggtgctttgaagggtgccgccggggggcttggcggcgtgtttcgcgccctgggtggccctgtcgggattgtgatcggcttgtttgcggccatgtttgccactaacgcccagtttcgtgccgcggttatgcagctggttggtgttgttggccaggctttggggcagattatggccgctgtgcagccgctgttgggtttggttgccgggctggtggcacggttggctcccgtttttggccagattatcggtatggttgccgggttggctgcgcagcttatgcctgtgattagtatgcttgtcgcccggctggtgcctgtgatcacgcagattattggtgcggtgacgcaggttgctgccatgttgttgccggcgttgatgccggtgttgcaggctgttgtggctgtgatacggcaggttgttggcgtgatcatgcagttggtgcctgttttgatgcctgtgattcaacagattttgggtgcggtcatgtctgttctgccgcctatcatcggtctgatccggtcgttgataccagtcatcatgtcgattatgcgtgtggtggtgcaggttgtttcggttgtgctgcaggtggtggcccgcattattccggttgtgatgccgattgtgacagctgtgatcgggtttgtggcacgtattcttggcgctattgtgtctgctgcagcccggattattgggactgtcacccgtgtcatttcatggattgtgaatcatctggtgtctggcgtgaggtctatgggcacggccatcttgaatggctggaatcatattagagcgtttacgtcagcgtttattaacgatttcaagtcgattgtttctggcggtgtgaacgcggttgtggggttttttgcccggcttggttcttcggttgcttctcatgtgaggtctggttttaacgcggctcgtggtgctgtttcttctgcgatgaatgctatccggagtgttgtgtcttcggtggcgtctgctgttggcgggtttttcagttcgatggcgtcttgtgttcggaatggtgctgtgcgcgggtttaatggtgcccggagtgcggcatcttccgctatgcatgctatggggtccgctgtgtctagtggtgtgcatggtgtgctgggttttttccggaatttgcctggcaatattaggggcgccttgggtagtatgggctccctgttggtgtctgctggccgtgatgtggtggccggtttgggtaacggtattaagaatgctttgagtggcctgctggatacggtgcgtaatatgggttctcaggttgctaatgctgcgaagtcggtgttgggtattcattccccgtcgagggtgtttcgtgaccaggttggccgtcaggttgttgccggtttggctgagggtattactggtaatgctggtttggcgttggatgcgatgtcgggtgtggctggccggctgcctgatgcggttgatgcccggtttggtgtgcgatcgtcggtgggctcgtttacaccgtatggcaggtatcagcgcatgaatgataagagtgttgtggtgaatgttaacgggccaacctatggggatcctaacgagtttgcgaagcggattgagcggcagcagcgtgacgcgttgaacgcgttggcttacgtgtgattgcggggtgtggttcatgtttattcctaacccgtctgatcgtgccggtttgacggtggattggacgatgtttccgttgattggtaataatccggagcgtgttcttcatttgacggattatacgggtgcgtctcctgtcatgttgttgaatgattcgttgcgcggtttgggtgttcccgaggttgagcatttttctcaaacacatgttggggtgcacggctcggagtggcgcgggtttaatgtgaagcctcgcgaggtgacattaccggtgttggtgtcgggtgttgaccctgatcctgatggcgggtttcgtgacggttttttgaaagcctatgacgagttgtggtctgcttttcctccgggcgaggagggggagttgtcggtgaagactcctgccggtgttgagcgtgtgctaaaatgccggtttgattcggtggatgacacgtttacggtggatcctgtgaatcgtggctatgcgcgctatgtgattcatttgacagcttatgacccgttttggtatggggatgagcaaaagtttcgttttagtaacgcgaagttgcaggattggttgggtggcggcccggtcgacaaggatggtacggcgtttccggtggtgttgacgcctggtgttggttctggttgggataacctgtctaataagggtgatgtgcctgcgtggcctgtgattcgtgttgaggggcctttggattcgtggtctgtgcagattgatggtttgcgtgtgtcttcggattatcctgtcgaggagtatgattggatcactattgatacggatcctcgtaaacagtctgcgttgttggatgggtttgaggatgtgatggatcgtttgacagagtgggagtttgcgcctattccgcctggcggttctaagagtgtgaatattgagatggtcggtttgggtgccattgtggtgtcggtgcagtacaggtttttgagggcttggtgagtggttgatggctggtcttgttccgcaggtaacattgtttacaccggattatcgccgggtggcgcctatcaatttttttgagtcgttgaaactgtcgttgaagtggaatggtatgtcgacgttggagttggtggtgtcgggtgatcattcgaggcttgacgggttgactaggcctggggcgcggctggttgttgattatggtggtggccagattttttcggggcctgtgcgtaaggtgcacggggttgggccttggcagtcctcgaaggtgactgtgacgtgtgaggatgatatccgcctgttgtggcgtatgctgatgtggcctatcaattatcgtcctagttttgtgggttcggagtggcgtgctgaccgggattatgcccattattcgggtccggcggagtcggtggctaagaaggtgttgcgggataatgcgtggcggttcccgccggatgtgtttctgaccgatgatgagaagcgtggacggttcattaatgattttcaggcccggtttcacgtgtttgcggacaaactgttgccgatattgtcgtgggctcggatgactgtcacggtgaagcagtttgagaatgcgaagtttgatcagcgtggtttggtgtttgattgtgtgcctgcggtgacgcgtaagcatgtgttgactgccgagtctggttcgattgtgtcgtgggagtatgtgagggatgccccgaaggctacttcggtggtggttggtggccgtggcgagggcaaggatcggctgttttgtgaggatgttgattcgatggccgaggatgagtggcttgatcgtgtcgaggtgtttaaggatgcccgtaacacggattctgaacatgtgcatcttattgatgaggcggagcgggtgttgcaggagtcgggggctacgtcggggtttaagatcgagttggcggagtcggatgtgttgcgttttgggccaggcaatctgatgccaggtgacctgatctatgtggatgtgggatcggggcctatcgcggagatagtgcgacagattgatgttgagtgtgattcgcctggggatgggtggacgaaagttactcctattgccggtgattatgaggataatccgtcggcgttgttggctcgccgtgtggctggtttggctgccggtgtgcgggatttgcaaaaattctagaatgatgggggtttgttgtgggtattgtgtgtaaagggtttgatggtgtgttgaccgagtatgattgggctcaaatgtctggtctgatgggtaacatgccttcggtgaaagggccggacgattttcgcgtcggcactactgttcagggtgccacagtgttgtgtgaggttttgccggggcaggcttgggctcacggggtgatgtgcacgtcgaatagtgttgagacggtgacggggcagcttcggggtccgggtgagacccgatacgactatgttgtcctgtctcgggattgggagcagaacacagccaagttggagattgttcccggtggccgtgcggagcgtgcccgtgacgtgttgcgtgccgagcctggcgtgtatcatcagcagttgctagcgactttggtggtgtcgtctaacgggttgcagcagcagttggataggcgtgctatagcggcgagggttgcgtttggcgagtctgctgcgtgtgatcccaccccggtggagggtgaccgggtgatggttccttcgggggctgtgtgggctaatcatgctaacgagtggatgctgttgtcccccaggatcgagacgggttcgaagtcgatcatgtttggggggtctgctgtgtatgcttacacgatcccgtttgatcgccccttcgagagtgcgcctgttgtggtggcttctatgggcacggcggctggtggtacgcagcagattgatgtgaaagcctacaatattactaataaggattttggtttagcgtttatcacgaatgacgggtctaagccttctaatgtgcctgcggttgctaactggattgctgtcggcgtgtgaccgggctgttgcggctgatgttgtaatgttggggggctgtggtgtcgtggattactcctgcactggtggcttctatctgtacggcgttggccacggttttgggttctgttcaggcgatcacgtctaaatctcggaggcgtttgcggcggctgtcggctcaggtggatgctttggaggagtatgtgtggggtgtgcggcgtgaggttcgccggttcaattcacggcttcctgatggggttgatccgttggtgttgcctgatccgcccggttttttgcaggattcgttggggggtgaatgatgagggagttggaggaggagaagcggcagcgccgctcgtttgagaaggcttctatggtgttgctgtttttgtcgcttatactgttggtggtggttgctgggggtgctttgcgtttcggctctgtggcttcccaaagggattcggagcaggccagggctgagtcaaatggtacagctgccaagggtttggctgcccgcgttaagcgggtgtgtgctgagggcggccgggagtctgtgcgtcttcagcggtctggtttgtgtgtggatgctgtgcgtaccgagcggagcgttcagggtgtgcctggccctgccggtgagcgtggcccgcagggccctgcaggtgctgatggcgctgatggtcgggatggttcggccggtgagcgcggtgatgtgggcccttcaggtcctgaaggaccccaaggtatacagggtgaacggggtgagcaaggccccgccggtgcgaacggatctgatggtaaagacggtaaggatggccgctcggtggtgtctgtgtactgttctggggggcgcctgtttgtgaaatatagtgacggtgtggcttccacgatatcgggctcggtggcctgcaaaacggtggccccgtcgcctatcgtgactgtatcatcccacaaataatatgaagagggaagggtgctactagtgttgataatgtttttggggggtggtgtgcggtgagatacattccagcagcgcaccattcggctggttctaatcatccggtgaatagggttgtgattcatgcgacatgcccggatgtgtggtttccgtccgcctcccgtaaagggcgtgctgtttctacagcaaactattttgcttccccatcatcggggggttcggctcattatgtgtgtgatattggggagacggtgcagtgcctgtccgagggcactattggctggcatgccccgcctaatccgcacagcctgggtatagagatttgcgccgatgggggttcgcacgcctcgttccgggtgcccgggcatgcctacactcgggaacagtggctgtccccgcaggtgtggccagcagtagagaaagctgctgtgctgtgccgacaattgtgtgacaagcatggtgttccgaataggaagctctcggtggccgatttagaggccggcaggcggggtgtttgcgggcatgtggatgttacggatgcgtggcatcagtcggatcatgacgatccgggtccctggtttccgtgggtcaggtttatggccgtagtctgcggcggtagtagtagtgatagtggggagttaactgtggctgatgtgaaagccttgcatgatcagattaaacaattgtctgcgcagcttgccggttcggtgaataagctgcaccacgatgttggtgtagtgcaggtgcagaatggtgaccttggtaagcgtgtggatgccctgtcgtgggtggagaatccggtgacggggaagttgtggcgtactaaggatgctttgtggagtgtctggtattacgtgctggagtgtcgtagccgcatcagtaggctcgagtctgctgtcaacgatttgaaaaagtgatggtggtttgttgtgggtaaacagttttggttgggtttgtttgagcgtgccctgaaaacttttattcaaacgtttgttgctgtgcttggggtgactgcgggtgtcacctatactgcggagtcgtttcgtggtttgccgtgggagtcggccctgatcacggccacggttgctgcggtgctgtcggtggctacctcgtttggtaacccgtcgtttgtggccggtaagcctggcaggcagcccctggtggatgcgggtttggttccacccgatgatggggggatggttgagtctcacctggttgatgtgtcggatcctggcatgatcgggcctgcagatgatgtggatggttttgccggctatgagcctcggcgtgccgccgagtcggaggttggcacggtagagccgattgaatgataagtgaatatgtgtgtgtgccccagcggtgctgccacgattgtgtggtggttgctgctggggcactctttttgtttatgcggtgcggttactgctggctgtttgggtgtcctgcactgtcgcagtcccacagtatttcgccacactcgtctagcgtgtcctggtcgatagcaaggttgtcgaggctgacttctttgatggtgaggttcacatcatcgagtgagatgggtacatggtactggttttcgacactgtcaacaatgttttctagctgttgcatgttggtgggctgttgttggatgattcggtgtaccgctgttttgagggcggtgtagaggatgttggttgtgttgtccatggtttttatgccattccttcgttatcgtctggcatgtagtatgtgctgtttgcatactctgtcaaggttatgagtgtttggcctgcccactgtttcacggtctgccgggtgactccgagtcgctgggcggctgtggcataggtttgatcatacccgtatacttccctgaaggctgccaggcgtgccaaatgtttcctctgtttggatggttcacaggtgagggtgtagtcgtcgatggctagctgtaaatcgatcatggtggcaatgttgttgccgtggtgttgtggcgcggttggtgggggtggcatgcccggctccacactgggtttccatggtccgccgttccagatccattgggcggcttggatgatgtcggcggtggtgtaggttcggctcacttggtcaccccctgaacatgttgtcgaggttgttggtgttgctggtgtcgaatcgtccgacgcagtggcagtagtcgtacatgagtttgatgatgtgttggtgatctcccaaataggtgtttccgctgatgctgtaggtggctgtgccgtctttactgatggtgtatttggcggtgatggtttcgggtgtttctgtgttggtgatgatggcggtggtggtggcgcctactgtttgtagcctggtggtttgggtgccgtcgtcgaggatggtggtaaccatgatgattctccttagttgctggtttggttgtcggctatggctgtgatttcttgtaccggtttgggtaggtctaggtgttgtatggttttgtttgctagtcgttgggctacacggtagcacatttgagtccactggttgccttgtagctggtggtattgttcccgcaccgcaatatatagtagagagtcttggtacaggtcgtctgggttgacagccgggtagcggcgggcaatattggtgcaggctttgtgtagctggtgttggtgggctggtgtggtccatccccaatcggctgtggttgctaggtctgctttggttggtcgtctactcatggcatctattctatcgggctatctggtagttgtttggtgttttgttgtttatagtgtagcacacgagtccggggttgccggtggtgcctgtgcggtgccggtaccagacggattctccttccatggatgggcattggatgaaggtgcgttgtccttgctcggagatttctaggtggtgtcggtgcccggccatgaggatgtgggatgtggttccgttgtggaattcttggccgcgccaccattcgtagtgtttgccggtgcaccattggtgtccgtgggcgtgcagtatttgtgtgccggccacatcgacggtggttgtcatttcgtctcggcttgggaagtggaagtgtaggttggggtattggttgttg

SEQ ID NO: 31 - DNA, 14934 bp, Pahexavirus sp.
  source 1..14934: mol_type = genomic DNA
accttaaggttttaaagtcttctacttataatatacactttaagtcttacctggtgttaagggtttaagcgtgacacgccgtacaccttcagccgaacacgctaagcctgaaaggggcacgggtgtcagagtgtggggagtgtgcgatgggagcgtgcgaccggtggtacacgagacacacggtgaaaagtccatcagcgctgacggtaaaggttcctcttctcccctgatgaagaaaagaagagaagagagaaagaaccaaagagagaatagaagtaaagaagttaaccctttaactcttctaaaacttttataacttataagctttaatactgaaattatattattattcctataagctttaaggcttataggttataatattaaagtttaagactgatggttaactttaagtacttaagatctttaaagtcttatagttactttaagtgtttaactctttaagtcttaaacactgatgttaattttataatcttaagtgctaagcctttaaggttttatgcttaacttaggtgttaaggtctttatactgatgctgagccttgaagggctcagtgctatgtgtgtaagcctttaaggttattaattaactttaagtgctaagctcttaagtttacttaaagtgtttaaggctttaagactgatgccgagcccttgaggggctcggtgctaagctatcagcaccttagcgctaagcccttaggtctttaagtctttggtagactgatggatgtaagggtgaaagccgcgtcagcggatttcggccttgcgtccagctggctacctgtccagcctatcataccccacctgggatgagtcaaactggtggatttggctctataggcgggtttgaggggtgtaaacgggtgtttttggtagtaaaggtccaaaaattaaacctaaacttttccttaaattttcttagagtcttgtaacctttacaggtggttaaggctgaaacccctagtcagaacgggtttcactcccggacagctgtcacacttcactcttgtgtcctttccgaacacgctaggcccatcagtgctgagggtgttccctcaggctttcgagtactcgtcgctagggctcctcgtactctcaagccttccctgatggcgtgtacccttttcagtgctgtgcctgatcggctgagcctgagggggctgatgccgagcccttgaggggctcggtgctaagtccatcagtgctaagaccctaaggctgatgctcccccttctttcttttaccgtgtccttctttcctcacagtatcccacactgtcaacatagttgaggcttagctaagcaggataggggctgatggtctctgccgagatggttgatcgcgtatcaggctgtgggaggcgtctagaatcgatcagaattgcttgggggtatgaatacctagcccccaccctgtaaggcgctcctaggcgtaccctcgaagctttaaacggcatttctgggctacaccctccacgccagatcgacatggtggcctcgaaggtgcacaccaagccaggagtatgtgatacatctcacatagtatgagggtgtggattccatgcccagatctggcacctcgacctttgcgatgcaggcctatcttaacccgctcaatcatctgccacacccgctatcacccagacatgcccctgagacgctctagaaggcccctagaatcgatcaacagggccaaccctgcataatcctacccccagaagatttcaggcgctgagagaggccataaaggcttaagtgagatacaccacatcccatgccatactccaccaaacgctcacaatcgttgagcgcagccttgactatggagtcgcagcccacacactgtagaaaccacaacaacccctacaccaccgaaaggagcacaccctcatggatggcacactcatcacaccatccttcaccagcctctacgggcagacagaaatcaacccactccaccccacacacctggcaggatgtgacataggcaacacccacacgtctatcatctgccgcctgcaccgtgccaaagtcgaagaagccgtacgactcatccgacccctgtggaccatcactcttgacggtgcagtgtatgggccacgcaactggcagccactcaccccagatgagactgaggaactccacgacatgatcgacacaatcgatgtggacgccatcatcgccgaagccacacgataaaaccatcaacacaccatcaccagaaaaggaatcatgatgcagaagatcgccaaccacttcacccagctctacacccccgccagctacgactgccctacacccttcgacctgacacgcctcgaaaacctctcctgcgatcacatggattttgagggcctcgccgaagcctaccggcagcgcatagagactgaactccacaagctactccccaacacgttcatctccaccgatggcaccgtgttcagccatgaagagtggaagccgctcacctgtgaggaagccacgcaactctactggaacgtgacccgcatcaatgtgggccacctactcaccctgtgcgcccgataaaacccctagccatacaaggatcgctcacaatcgttgagcgcagccttgacacaggccaccgcccacaccatgattaatcatgtcagcaacgaacaacaccccggaaaggggacaacagtcatgaacaagaaaacaggctacaccatcgccggaatcacagccgccatcatcgccgcagcatccttcctgccagcacccgacgacaatccgccactagcctcacagccaacaccacaagccaccacagccaacaccacatggacacctgataccgtccagcagcgcaaagccgaaaagaaagcccgccaggccgcagcagtccgctccctacaagccgagcaagccaaagcccacaagcaggcccaagcgaggggtgaagaaacctccacaggtctcaccatgattacggcggcacacgcctgcaatgacaaggctgagcaggcagctgcagcacagggtgtcaaatggaacggcaaccccgacatcgacctccaactccacaaaattattggtaaagacaccttctccatcgtctacggtgccaccgcgaaacaggccggcgcatccaaacacccagtcaccgtccactgcctcgtcaccggaacagaagaccacccgcacgtcaccgacctcaacatcaacccgcaacagtaacccgccaaggagcatccccgctatgcctctcctctcccactacgctgtcaccaccggactcgccgacacggcacacattattcaccacaccggcggcacactacgcacagccaccgatattgcctcccgcatcaacaccctcaacccagacataaacctcgaccaccaaatcaaccaactgttatctatcgaaaccgacctgtacaacatttataaaaccatcaacacaattcttcaggagcaagcatgaacacacccaacaacattgagctacacagttacgaaacgttcttcaccacactggcatggattcaaggcggcatcatcacatggatgtacgcaacaggaaccagccataaagccgccctcgccatcattgccgcatgcgccctcgccaccgtcctaggcgcctcaacactcaccaacaatccccgagacagcaaatgatcacaacacccatcctgatcgctgaaaccctcgccatcattatcctcgccgtcgccctagcccacaaccccaaccagtaacccacactcaaggagcacacacaccatggataagcccacccgcatgtacaccgaccctgatactggcgccaaaaaagaactcaaactttgcaggctatccctcatcgaccccgcagccttacacgccctcggctccgtggcaggatacggcgccaccaaatacggcgacaacaactggaccggcggctatccgtggagccacagtgtcgacgccctctacaggcacctgctatcatggcagcaaggcaacaacctcgaccacgaatccgggctaccccacctggcccatgcagcctggcactgcctcgcactcctcgcctaccagcaacacgatgccggggtagacacccgcaacccatggaacacccacaaaggcgacaagtaatgcccctagcacaaaaaccgtccaccattgaccatccaggccacatctcctacagttcactcacacagtgggccgaatgcggagaaaaatggcggctctcccacggctaccacgcccaacaccacacctggtacgtcaccatcgccggaagcgccatacaccacatcaccgaacaatacgacctacacctgtacaatcccgacgaataccctgcactgccaggcaaactctcatccttcacaaacattttcgacacccaagtcgccctcacccgatccgaaggcacagaaatcaaaccctccggcagaatatgcaaaaacatgtgcgagtcgggcgggccacacaagaaagacaacaattggtggatgatatacggccccacctttgtggaccggtggaaaaactggaggcgcaaccacccagaatacatcaccgctgttattgacggccagccaggcttcgaatacccggtagaaaccaccctccaggatggcaccactattgtcggctacatcgaccgtatctgcaccgacaccgacaccggcgaaaccttcatcctcgacctcaaaaccggccgcctaccagcagacagcatgcagctgcacacatacaggtacatgctagaacaacacggcatccatgtgacgaaaggcatgttttggatacccgccaccaccaagggagacgagcaatcggtcgaacagggcacatccaccgaactctacgatcttgacaacaacacctaccggcatgtatcatccatgtatagtcaagcaatgaaaggaatcagccaaggcatcttcgtaccccacgtcacagcactctgcaaaggctgccccgtcaaggacgcctgctgggctgtcaacgggaaagacgcctacaggtaccctatagaaaccaccatcacagccccaacaaaagaaggcaaggagcaccagtgaccgacaacacagacgacgaccgattcaccgtcacactcaaatacggaggcgactacgccgccccatggaccgtcatccgcggagacaccgccgaccaggtaaagaaggctatcatcgacctgctaggcggactcaaaaacagctccgcggcgaggaactgggacctggcaacactgatcgccacagcatccatcatcctccaagaccgatacaaccaggccgccaaagactatgtagacaacatcgcctcagaaggaaacaacaccatcatcgacaaaatcaacaaagccaccagcaaagcacagctagcagaccttctaaaacagaacaaaaaggccatcactagtaacagtgacgtgtccgaggtgttccgcactaaacgaaacagcctcacccgataaaaccgacaccaaccaacaaaacagtaaaggaaacaataatgggactcgccacctaccgaaacaacaacagcaacagcaccttcttcaacccctccagaaaccaggacgccaccgccatcgctttcaaaatccacgacgtagaacacaataccgaaggctacggcggacaggtcgccgaccgtatttacgccgatgtcaccatcttccacaccctccaggatctcaacaacggcaccccagaaaccatccccaacgctattattgagaaagcacgcggcaacaacgaccgcccacactccatgatccgcgacctcgaagcatatctcggcgaggagcaggccttcaaactcgccaccgtgcgcaccaaaaacgggttcaacgcggtcgtgctcaaaccccttgatgacgccatctacgataaggttgccgcatacgtagacaagcgcgataatggccggctagacgacaccacagcctcaactgatgctgatatcgatatcgactccatctgaccaccaaaacattatccaaccgatagacagatagattaaggctccgatgctctctctccaacgatccttcgagagagcctcccaaacagccgccgaactgccccgcatcccccagctagaacccctctaccgcagcctggacatgcacatccacaaaggggatctcgtcatgatcgcggggcggtccggcagccaaaaatcagggctagccatgttcatcaccgcgatgctcaaccagccagccctctacatatcaggggacatgacaccctgggaggcctccacacgaatcatctcactcaacacccaacacaccaccacacagatacaacaaaacatcgacgactacgggccagaatactatcgagacagcatccaccacggcgcgcacatcacattctcattccagtcacccatcacctggaccgacatcaccatggaactgcaagcctacatggaaatgtggaacaccttcccccccatcatcgtcatcgacaacctgatggacatccaagactgcgaatccgactatcaggcacagcaagaagccatgcaatggatcacagcattaggtagggataccggatccaccattattgtcacccaccacgccaccgacaaaaccggcaccgacatcgatcaccccccggctaggcgggaaatcaaaaacggcctctccgaaaaaccacaactcatattgggagtctccctgtatggtggcgaagacaacggcaacgggctcaccatcccggcagaggcacgcatcgcagtgttgaaacagcgcaccggcaaatccagcccagacggaacaaaatatgagcggctcagagcctaccccgaatacacattcttcgggccactcgccgaaaaacagccatggaacatgaccgaacaccacaaaggactatcatgtcaacacaacaggcacgcaaccgccgggccggagccgaatgggaaacacgactcctccaccaactacgcgacaccggccatgatatagaacccctccacctcaacggtaaagaggatgaaggcgacctcatcctcacaaccagccacaaagcctatgtgatcgaagccaaagccggacagccacacctcgccgaattcgtgaaacaagccagccgggaggcacgcaactacgaaacacaccgaaacaaacaaaacaattccaccatcggactcgtagtgatgaaacagcgcaacaagccctggagcgaagcctatgtggtatcaaccctcaacgagctcctcccacacctctgacacccgccgcctcctcgacacccaccacatccgctacaacccatccaggaacgagcaacacatcctctgcccgttccacgacgaccaccagccatccatgagcatcaacctcgacaaaggcctctggtactgccacacatgcggcatcggaggcggactccacaaactgaaacaacaactcgaagaaagaaacccgaatgtacgacagcctacaaccctacaaccttgcggaacgccgccgaatccagaaagcctcagcccgctacgaaacccacctcgaaaacatactcgacctcctctcagcaagaggcatcagcgaagaaacagcccggctccaccaccttggatacatcgataacgaccccatccccggccacgaagactacaaccagtgcatcaccatcccctacatctaccccgattggggcggcccagccgaaatacgaaaaatgcgtttccgctgctcactcccccatgattgcaaaacccacaaccaccccaaatatttgacccccgccggagacacaggctccgtctacaacatggccgccatggccaacccgacagccgaaatgcacatttgtgaaggcgaattcgactccatgatcctcgaacaatgcggatggtcggccgtagccctacccggcgccacctcgtggcaaactttctggaccaaattttttgaaggctacgaccatgtttacatctggtcagacccagacaaagcaggcgaccagatggcacaaaccctaacccaagcattaccgcaagccacccatgtgcccctcactgtcggggatgtcacagacacctacctgcaggccggcaaaacagggttgacacaagcactagacacagtgctacaataaaaccacacaaacaaaacatcactccaagaaaggcataaaaaagcatcatggaccccctcgacacatgccccatccccggccgccgcgacaccagcaaagccgccaggaggcgtatccgcctcgccatcagtgcagaaaaatgggccgacggtgaagacccactccacatcatgcacacctggggcaccacctacgatgggatgcgatccatgatccgcgccaaccccgacatcaagctacccgacgacatgaccaaacggttacacaaaatctgccgggaagcctaccccaaaaaccagcccaacaggcaccgaagcggatgggaccaatacgaaaaagactactacacggaggaaatcctcttcctcaaccaattcaacattcccgccctcgaaatccttaaccggctcgacgtgtcatggaccatgtggaaacacatcatcaacgagcagcacctcacccggctccaacaggaaaccgacaacgcctgccaatgggccaacctacgaaaacaacaccccgacaaaaccgatcaggaaatcacccagatgatgtacaataaccaagtaactttcagcatggtgatgaaaaccatacccgcataaacatccaccacacccgcataatatgtgcacactctttcacacataggaggcatgatggtcaccacaaccccacacgtgaccgacacaaacagggacaacaacggcaagtttcccgaacacctacaagacgtcatatgcggccgtgccatcatccacaatgccggcaacgtatcatggtgcacacgcaaaccaggacacgacggcgactgccgcacaggctggcagcccaccacacaaccgataggacatcatggcaaccaaaactgaaaccctcatccaacgctacggtgataaagctgcagacgtcctcgccgacaaaaccatccccgccacacagctagcccaaatgctcactgaagccggataccccatctccgccaccgacatcaaagactaccgccgcaaacaagccaccaccacacacgaggaagaggaggaaaaccagtgatagacaatatagaccggctcctcacccagctagccaaccacgacaacgccatcaacaccatcgacgacaatctagccaacggcaccgtgcgccgcacacgcatctccgaatgggccttacccaacggagaaacaggccgatccatacaaaaaatcatcgaccaccaacccgcaaccaacccctaccctgtagacgaactcgtcgataaactagccgaatggcagccaccaaaacccgaacaagacacccgcaccgactacagcaccgcggccttcgttatcggggcgggagacttccaaatcggcaaaggcatccccggcggagaaacagcacacttcgccgacgactatttgcactccctcatagtcgcaaaacactactggcaacaggcaggcaaaccgcaacgggtccacatcgccttcctcggcgacatgatcgaaggatacgtgtcacaaggaggcaacaacgcctggcgcacacaaacacccctgactgaacaaatcaggctcacccgcatggccatgatgcaactcgtccacatgttcgaccactgcgaaaacgtgaccatcacatccatccccggcaaccacggagaagccgtgcgcttcggaaaaggagtcaccacctacgacgactccttcgacgtggactgctgccgggccatcgcagaagcctaccagctcaacaaccaataccccaaccttcacttccacttccccagccgagacgaaatgaccaccaccgtcgatgtggccggcacacaaatcctgcacgcccacggacaccaatggcgcaccggcaaacactatgattggtggcgcggccaagaattccacaacggcaccacatcccatatactcatggcagggcaccggcaccacctagaaatctccgagcaaggacaacgcaccttcatccaatgcccatccatggaaggcgaatccacatggttccggcaccgcacaggcaccaccggccaccccggactcgtgtgctacactatcaacaacaaaacaccaaacaactatcagatagcgagatgaaatagtgctatgagcagacgaccaacaaaagcagacctggccaccaccgcatcgtgggtgtgggccacagaccatcatctacgcacactcaaccgggcatgcaccaaaacagccgcacactaccccgcaatcagcgcagacgacctctaccaagactccctactatatattgcggtgcgggaacaataccacaacctagacaacaaacactacaccaaaatgtgctacagggtagccaaacggctagccaacaaaaccatacaacacctagaccagccgaaacctttacccgacatcattcatctagccgacaaccaaaccagcaactgaaaaggagaacacacaccatggtcacaaccatactcgacgacggcacccaaaccaccaggctacaaacagtaggcaccaccaccacagccatcatcaccaacacagaaacacccgaaaccatcaccgccaaatacaccatcagcaaagacggcacagccacctacagcatcagcggaaacacctatttgggagaccaccaacacattatcaaactcatgtacgactactgccactgcgtcggacgattcgacaccaccaccagcaacccagacaacctcgacaacctattcaggggatgaccagtgacccgaacctacaccaccgccgacatcatccaagccgcccaatggatctggaacggcggcccatggaaaccgagtgtggagccgggcatgccacccccaccaaccgcgccacaacaccacggcaacaacatcgtcaccatgatcgacctacaattagcgatagacgactacaccctcacatgtgaaccatccaaacagcgcaaacggctagcccgcctggcagccttccgtgaagtatacgggtatgatcaaacctacgccacagctgcacagcgactcggagtgacaagacagactgtgaaacaatgggcagaccaaacactcatcaccctcaccgagtacgcaaacagcacatactacatgccagacgataacgaaggaatggcataacaaccatgaacaacacaaccagtatcccctacactgccctcaaaacagtagtacaccgaatcatccaacaacagcccaccaacatgcaacaactacaaaacattgttgacagtgtcgaaaaccagtacggtgtacccatctccctcgacaacgtgaaccttaccgtcaacaatgtcagcctcgacgatctcgctatcgaccaagacacgctagacgagtgcagcgaaatcctatggttctgcgacagtgcaggataccccaaccacaacaacacacagtaaccgcaccgcataaacaaaaagagtgccccagcagcagccaccacacaatcgtggcagcaccgctggggcacacacacatattcacttatgcaacagtagactctaccgtgccaacctccgactcggccgcacgccgaggctcatagcccgcaaaaccatccgcatcatccgtcggctcgatcatgccaggacccgacacatcaaccatgtgaggctcaaccaagcccccatcatccggtggagccaaacccgcatccagctgagacttgccgggcttaccagccacaaacgacgggctaccaaacgaagtagcaaccgacaggacagcagcaaccccggctgtgatcagcgcagactcccacggctaaccgcgaaacgactccgccgtatacgtgacacccgccgtcacccccaacacagcaacaaacgtttgcacaaaagttttcagggcacgctccagtaggcccaaccaaaactgtttacccatcacacatcacttcttcaaccgggccacatccgcctcaagcctggcaagacggctacgacactccaacacgtaataccagacactccacagggcatccttgctacgccacagcttccccgtcaccggattcttcactcacgacaaggcatcaacacgtttacccaaatcaccattctgaacctgaaccacaccaacatcgtgatgcagcttattcaccgactgggccacctgtgccgacaattgtttaatctgattatgtaacgcttgtacatcagccatactcaactctccactctctccactgccgccgcagactacggccataaacctatcccacggaaaccacggccccggatcgtcatgatccgactgatgccacgcatccgtcacatcagtgtgcccgcaaacaccacgtttaccggccttcaaatcggccacggacagtttcctcttcggaacaccatgcttgtcgcacaactgccgacacaggatagcggccctctccaccgcgggccacacctgcggatccagccactgctccctcgtgtaagcatggcctggcacacggaacgaggcgtgcgaacccccatccgcgcaaatctctatacccaaactatgcggattcggcggggcatgccaaccaatcgtagactccgacagacactgcaccgtctccccaacatcacacacataatgcgccgaaccaccagacgatggggaagcaaaatagtttgctgtagacaccgcccgccctttacgagaggcagacggaaaccccacatccgggcatgtcgcatgaatcacaaccctattcaccggactattcgaaccgctcgagtaatgcgccgcaggaataaacctcaccacacaccacccccaaacaccatcaacatcagtaacacccttcctctctcacttgcgggatgacacggtaaccaccggtgacggggccacaccctcacaagccaccgaacccgatatggtggacgccgtaccgtcactatatttcacagccaggcggcccccggaacagtacacagacaccacagagcgcccatcagcgccatccttaccgtctttaccatcggatccgttcacacctgcggggccacgctcaccacgctccccctgtgcaccggctgcaccagggggaccggcagggccacggccaccatcagccccatcagagccatccctaccaggcacaccatctttaccgtcagccccatcaacaccatcgacaccatccttgccgttagcgccgggcggcccgtcaggacccttcacaccattcaagccaggggaaccctgcggaccaacagagccaaccagcccagccgaaccatcaacaccagcccgcccctgcgggccttgcgggccacgcacaccagccgggccaggcacaccctgcacactctgctcaacacgctgagcgtccacacacaaaccagaccggtgaagacgcaccgactcccggccaccctgcgcacacacccgcttcacacggttagtcaaccctttagcggctgtaccattcgactgggctcgagcctgctccgaatccctttgcgaagccacagaaccataccttaaagcacccccagccatcgccaccaacagcacaagcgacaaaaacaacagtatcagtgaagccttctcaaaattgcggcgctgccgcttctcctcctccaactccctcaaccctactcacctccaccatcaacaatatacttcaaaaactcgggcaaatcaggcatcttcacaggctcaacatcatccggcagattcgcgttatagcggtggacaatatggcgaatattccacgtgtattcttccatcgcagcaacctgcgcagacaactgcctcagcctcttcttcgacctgtacgtagccgcctgaatcgaaccaagaacagtagcgatagcggtacaaagagaggctacgagtgtgggtgtaagccatgacactacagccccctaccactacaaccaccacaacacgtcacatacccgcaagccgcacattacacgccgacagcaatccaattagccaccgcaggcacatccttcggcttagccccgtcattcgtaataaacgccaactgaaaatccttgctagtaatattgtaggctttcacatcaatctgctgcgtaccaccagccgccgtagacatagacgccacaacaacaggcgcactaccaaacgggcggccaaacgggatcgtgtaagcatacacagcagacccgccaaactggatagacttagtgcccgtttcgatcctgggggacaacagcatccactcgccggcatggttagcccacaccgcccccgaaggaaccatcacccggtcaccctccacaggggtaggatcacaagccgcagactccccaaacgccacacgggccgccacagcacgcctatccaactgctgctgcaacccgttagacgacaccaccaaagtagccagtagctgctgatgatacacgccaggctccgcacgcaacacgtcacgggcacgctccgcacgccccccaggaacaatctccaacttggctgtattctgctcccaatcccgagacaacaccacatagtcgtagcgggtctcaccagggcccggaagctgccccgtcaccgtctcaacactattcgacgtgcacatcaccccgtgagcccaagcctgccccggaaaaacctcacacaacaccgtggcaccctgaacagtagtacccacacgaaaatcgtccggccccttcacagacggcatattacccatcagaccagacatttgagcccaatcatactcggtcaacacaccatcaaaacccttacacacaatacccacaacaaacccccaattcttttctaaaatttttgcaaatcccgcacagccgcagcctaatcagccacacggcgagcctag

SEQ ID NO: 32 - DNA, 10745 bp, Pahexavirus sp.
  source 1..10745: mol_type = genomic DNA
acccaaaaatcagtgcatcaagctgaacgtcacacgacgccctagcaagccgattcgcagcatacacaccatccaggccgtagccgtcaccattagtccagccaagccaatccagacgctgctccaaagcatccacagcaataccaggccacgacaccaccgtctgcacacgctgcaactccggcggaatagccacccccaaatcacgcacccgattagagccctcatagtagccctcaatacgacaatgccacgaagacaacctttggatacgatcgtacatgccctcaatcagagccaactcgtccacgttcataccacagacacccgcttcctaccagaccgttcacgccgcttcactttaactgttttcgcaccaagatacgccagcgatacagcctccaaaggaacctcagaaccatccttaaacgaggaaccccaaccccacgcagagcctttcttcttctgcacagccgacctcacagcaatatccaacatgtcacgcctcgaatcggcacgaggatgagacacaacacccgaacgaacaccctcaagaaacgcctgacacgcctccacataggtgccagtatcagcaaccaccacgccacggcccggaacaccacgatcacttaaagccttttgcaaaagcacagcacccgaaccgccaaccatgatcttttccgtgtcaccccaacgcaacgccaaccagtcagccaaccggcccacaccatcaacaatcgttcccgacagcccatcaataacctcaacatgaaccccagcatcagtccggccggcacccgccaaagcaacccgatccccagaacgagaaaacgagacaccaaacactttcccgccaaccagactcgcctcatccaccgcagactgagcccacttatccgccggaacaagagacgtagccgactggccacgatcccaccagccaagccgctcccgagcaaaacccgcagcagacatcgactcatgctcatccgagactgtcccaaaattcagacgcctacccaacgccggattcgtatcccccgccaacttccgccactgccgcgacacatcatccggatcagactcgtcaggaatcgaaaactccgtccacgcaaaccttttaccacccgacaaagcctgaccacgaagacgcaacaccacagacccgtcagccaacgggccaggcggcgtaccaaggaaaatctgctgcggatcaccagacggggcagcacttaccgtaggaagcaaagcctccaactgctcatccgacaactcctgagcctcatcacacaccaaatcatcaaccgtaaacccgcgagcagaaccccggctacgagccacaaactccaccgaaccccaacccggccaaccacacttacgctcaaacgtggcacaatccggatgatgcaacacaatagcctcctgacaattcgtcgcacgaatcgacttcaccatacgatacaagtcaggaaactgccgctcattctcaaaacacgaacgcaaccgcataaacgccttacgagccgacttcaactcgtgagccgtatgcaaaatacggcgaccctgaatagtcgccttaaacaactccacaccctccaaaattgcattcttgccattctggcgaggcacaaacaccccacacacacccgaagcaagccttccattaccacccacagcaagccagtcatccaacacctgctgctgccacggatcaggtgtcaacccatacgcacgacccaactccccagcatccccgccagcagacaccgaatacgccgcagccacacggtgacgaggaacctgagacccaacaacaccagacacctactcaagcccccctgcgcttcctattccggtcaatcatcgccaccgcagcacccccaccacggccaccagccgccacatcacccgaatacctatccaacatgcccataaaagccttcacatgagcacgaagcgacgccaccaaatccgcgcgaccctcacgccacacacaatcatgaatcaccgcagcatccatgagaaacaaccactcctcatcagacacgtactgcgcgcgactatcctcaccccacacacgccaccaacgacgcgtctccccacaccactcacgactatcaggaagctcaggctgcacaacactcaccaccaacacaaaaagtcgacaaacagacaaatccacaaaagggaggtatttcactaagccgtacgaggtttgcacgggtgtgcagggggtggttcccgtgggggttggcgggtttttcaccatggaatcaatgtttttgtggtttgttgttggaatttgatgtttggttgtgttctgttgcctttgcttctgttgcatgttctgcagatgatttgcccgttgtcgagggtgttgagtcctcccctgctgacgggtgtgatgtggtcggcttcgggactagttgggagatcatgtgtgttccaggtgatggttgctccgcagagtgggcattcggtttggccttgctggcgggcttgggtgatgagtcgcgcccgccagcgccggtgggcttgactggctgtgcggttggtgtgtgccatcgcgtctccgatcctagcctagccctgtacgggtcttatttgcctctctaacggccttgaatcgtctgggggtatgaataccttgcccttgccctgccgatcgattctaggggcggttttgtgcgtttgagggggtgttctgtttgtgccggggtggttgttttctccactaccccctggcatgtgaaaaatatcaaatcgccccccagcggtgtcaaaagaaagaaggacacggaagaaaaaaggggggtgggtgttcacgcttcaaggcttggcgcctagcgttaaaggacacaggctaagcgggaacaccttaaggttttaaagtcttctacttataatatacactttaagtcttacctggtgttaagggtttaagcgtgacacgccgtacaccttcagccgaacacgctaagcctgaaaggggcacgggtgtcagagtgtggggagtgtgcaaccgggagcgtgcgaccggtggtacacgagacacacggtgaaaagtccatcagcgctgacggcaaaaggttcctcttctcccctgatgaagaaaagaagagaagagagaaagaaccaaagagagtagagaagtaaagaagttaaccccttagctcttctaaaacttttataacttatattatattattatacctataagctttaagacttataggttataatattaaagtttaagactgatggttaactttaaatacttaaggtctttaaagtcttatagttactttaagtgtttaaagcttataagtctttaagtcttaatagttattttaagttttaaagtcttaaacactgatgttaagtttatatccttaagtgctaagcctttaaggttttatacttaacttaggtgttaagatctttatactgatgctgagccttgaagggctcagtgctaagtgtgtaagcctttaaggttattaattaactttaagtgctaagctcttaagtttacttaaagtatttaaagctttaagactgatgccgagcccttgagggggctcggtgctaagtgttaaggtcttaagggcttagcgcttagctgttaagcttttaagtctttggtagactgatggatgtaagggtgaaagccgcgtcagcggatttcggccttgcgtccagctggctacctgtccagcctatcataccccacctgggatgagtcaaactggtggttttggctctataggcgggtttgaggggtgtaaacgggtgtttttggtagtaaaggtccaaaaattaaacctaaacttttccttaaattttcttagagtcttgtaacctttacaggtggttaaggctgaaacccctagtcagaacgggtttcactcccggacagctgtcacacttcactcttgtgtcctttccgaacacgctaggcccatcagtgctgatggtcttccctcaggctttcgagtactcgtcgctgaggctcctcgtactctcacgccttccctgatggcgtgtacttgctaaggctgtgcctgttcgggctgatgccgagcccttgagggggctcggtgctaactgctaagaccatcggtgctaagcgctaagaccttaaggcttgaaggctgatgctccccctctttcttttaccgcgtccttcttcccccacagtatcccacactgtccacatagttgaggcttagctaaccagggtaagggttgatggactagttcttgggtgctgttctcgtgtaagctccaaaacagcccctagaatcgatcagaatatcattggggtacaaatacctagggttgagggtgcaagagcctcagaggggcctttacgtgtcttagagaggcattcctgtcccctgtgccatctgcggggtaggctggtggatgtctgtggtgtccctagactctaggcgatgtgacatatctcatataaacgaagagtccttcaggcactcgtgcagccagaccatctagtgcccccgactgaacaccctcttccagtttgcgtcacttgccacacccgctatcatccagacatacccctcagacaccctagaagggccctagaatcgatcagcagggccaaccctatataatcctacccctagaagatttgagacgctgagaggggcaataaaggcttcagtgacatctgtcacacccgacactccagcatgaaacgctcactgggtttgagcgcagccttgactatggatcacaaccctcacaccataaaaaccacaacaaccaaccaagacgatccagaaaggaacatcacccatggatggcacactcatcacaccatccttcaccagcctctacgggcagacagaaatcaacccactccaccccgcacacctggcaggatgtgacataggcaacacccacacgtctatcatctgccgcctgcaccgtgccaaagtcgaagaagccatccggctcatccggcccctgtggactgtcaccctcgacggtgccatatacggaccccaggactggcagccactcaccgctgacgcggccgaggaactccacgacatgatcgacacgatcgatgtggacgccatcattgccgaagccacacgataaaactatcaacccaccacacgagaaaaggaatcatgatgcagaagattgccaaccacttcacccagctctacacccccgccagctacgactgccccacacccttcgacctgacacgcctcgaaaacctctcctgcgatcacatggattttgagggcctcgccgaagcctaccggcagcgcatagagactgaactccacaagctacgccccaacaccttcatcgcatccgacggcacagtgttcagccacgacccgtggaagccactcaccagtggggaagctacgcaactctactggaatgtgagccgcatcaacgtaggccacctcctcaccctctgcgcccgataaaacacctagccacacaagaaacgctcacaagagctgagcgacaccttgacagtggtagtccagtctggaaatattaaccatgtcagcaacgaacaacaccccggaaaggggacaacagtcatgaacaagaaaaaaggctacaccatcgccggaatcacagccgccatcatcgccgcagcatccttccttcccgcccccgatgacaacccgccactcgcctcacaacccgcgccgcaagccaccacagccaacactgaatcgacccccaagactacccaacagcgcaaggccgagaaagcggcacggcaggcagccgccacccgctccctacaagccgaacaagccaaagcccacaagcaagcccaagcaaggggtgaagaaaccaccaccggactcaccatgatcacggcagcacacacctgcgaccgcaaagccgaacagcaagccgccgcacacggtgtcaactggaacggcaaccccgacatcgacctccaactccacaaaattattggtaaagacaccttctccatcgtctacggcgcaaccgcgaaacagcccggagcatccaaactacccgtcaccgtccactgcctcgtcacaggaacagaagaccaccccaacgtcaccgacctcaacatcaacccgcaacagtaacccgccaaggaccgctatgcctctcctctcccactacgctgtcaccaccagcctcgccgacacggcacacattattcaccacaccggcggcacactacgcacagccaccgatattgcctcccgcatcaacaccctcaacccagacataaacctcgaccaccaaatcaaccaactgttatctatcgaaaccgacctgtacaacatttataaaaccaacaacacaattcttcaggagcaagcatgaacacacccaacaacattgagctacacagttacgaaacgttcttcaccacactggcatggatacagggcgccatcatcacatggatgtacgcaaccggcaccccacacaaggcagccctcgccatcatcgccgcatgctccctcgccaccctcctgggtgcatccacactcaccaacaatccccgagacactaaatgatcacaacacccatacttattgctgaaaccctcgccatcattattctcgccgtagcactagcccacaaccccaaccagtaaccccacacttaaggagcacacacaccatggatgagcccaccagcatgtacaccgaccctgatactggtgcccgaaaagaattgaaactctgcaggctctccctcatcgaccccgcagccttgcacgccctaggcgaagtagccggatacggtgccaccaaatacggcgacaacaactggaccggcggctatccgtggagccacagtgtcgacgccctctaccggcacctgctatcatggcagcaaggacgcaacctcgatgatgaatccgggctaccccacctggcccatgctgcctggcactgcctcgcactcctcgcctaccagcaacacgatgccggccaagacacccgcaacccatggaacacccacaaaggcgacaagtaatgcccctagcacaaaaaccgtccaccattgaccatccaggccacatctcctacagttcactcacacagtgggccgaatgcggagaaaaatggcggctctcccacggctaccacgcccaacaccacacctggtacgccaccatcgccggaagcgccatacaccacatcaccgaacaatacgacctacacctgtacaatcccgccgaataccctgcactgccagacaaactctcatccttcaaaaacattttcgacatccaagtcgccctcgccgaatccgaaggcacagaaatcaaaccctccgggcggcaatgcaaaaacctgtgcgaaagcgggggcccacacaagaaagactacgactggtggatggtttacggccccacctttgtggaccgctggaaaacatggaggcgcaaccatccagaatatgctatcgctgttattgacggcgagccgggcatcgaatacccggtagaaactatcctgaaccctgacacaaaaatagtcggatatattgaccgcgttttcaccgacaccgacaccggcgaaaccttcatcctcgacctcaaaaccggacgcctacccgccgacagtatgcagctgcacacataccggtacatgctcaaccaacacggcaacgatgtgacaaaaggcatgttttggacgccggccaccagccgcaacgacgataaatcccccgcacagggcacatctaccgaactctacgaccttgacaacaacacctaccggcatgtatcatccatgtacagtcaagcaatgaaaggaatcagccaaggcatcttcgtcccacacgtcacaacactctgcaaaggatgccccgtacaagacgcctgctgggccgtcaacggcaaaaattcgtacagatacccggtagaatccaccgtacagccaccccaaacagacaataaagaaaaggacaccaaatgaccgataaagacaagatcgacaatgatcgactcacgatcacactcaaatacggaggcgactacgccgccccatggaccgtcatccgcggagacaccgccgaccaggtaaagaagactatcatcgacctgctaggcggactcaaaaacagctccgcggcaaggaactgggacctggcaacactgatcgccacagcatccatcatcctccaagaccgatacaaccaggccgccaaagactacgtagacaacatcgcctcagaaggaaacaacatcatcatcgacaaaattaacaatgcaacaagcaaggcacagctagccgacctcctcaaacagtacaagaagatcatcactagtaaccctgacgtgtctgaggcgttccgcactaaacgaaacagcctcacccgataaaccaatataaaccaacaaacaaaccaacaaaacagtaaaggaaacaacagttatgggactcgcaaactaccgcaacaacagcaacagcaccttcttcaacccgtcccgaaaccaggacgccaccgccatcgccttcaaaatccgcgacgtccagcacaacaccgaaggctacggcggacagaccgcggaccgtatttacgccgatgtcaccatcttccacaccctccaggatctcaacaacggcaccccagaaaccatccccaacgctattattgagaaagcacgcggcaacaacgaccgcccacactccatgatccgcgacctggaagcctaccttggcgaggagcaggccttcaaactcgccaccgtgcgccccaaaaacgggttcaacgcggtcgtactcaaacctctggacgacgccatctacgataaggttgccgaatacgtagacaagcgcgataacggccagctagacgacaccacagcccctgccgatgctgacatcgatatcgactccatctgaccaccaacacacatccaaaccgtaacagataaaggctccgatgctctctctacaacgatccttcgagagagcctcccaaaccgccgccgagctgccccgcataccccagctagaacccctctaccgcaacctggacatgcacatccacaaaggggatctcgtcatgatcgcggggcggtccggcagccaaaaatcagggctagccatgttcatcaccgcgatgctcaaccagccagccctctacatatcaggggacatgacaccctgggaggcctccacacgaatcatctcactcaacacccaacacaccaccgcccagatacaacacaacatcgacgactatgggccagaatactatcgagacagcatccaccacggccaacacatcacattctcattccagtcacccatcacctggacagacatcaccatggaactgcaagcctacatggaaatgtggaacaccttcccaccactcattgttatcgacaacctgatggacatacaagactgcgagagtgactaccaggcccagcaagaagccatgcaatggatcacagcattaggtagagatactggctccaccattattgtcacccaccacgccaccgacaaagccggctccgacatcgaacaccccccggcacgcagggaaatcaaaaacggcctctccgaaaaaccacaactcatcctcggagtctcattgtatggtggcgaggataacggcaacgggctcaccatcccggcagaggcacgcatcgcagtgttgaaacagcgcaccggcaaatccagcccagacggaacaaaatatgagcggctcagagcctaccccgcatacacattcttcggacccctggtcgaaaaacagccatggaacatgaccgaacaccacaaaggactatcatgtcgacacaacagtcacgcaaccgccgggccggcgcagaatgggaaacacgactcctccaccagctccgtcacatcggccatgatatagaacgcctccacctcaacggtaaagaggacgaaggcgacctcatcctcaccaccagccacaagacctatgtgatagaagccaaagcaggacagcagcatctagcccaattcgtcaaacaagccagccgagaagcacgcaactacgaaacacaccgaaacaaacaaaacaattccaccatctgactcgtagtgatgaaacagcgcaacaaaccatggagcgaagcctatgtggtatcaaccctcaacgagctcctcccacacctctgaaacccgccgcctcctcgacacccaccagatacgctacaacccgtccaggaacgagcaacacatcctctgcccgttccacgacgaccaccagccctccatgagcatcaacctcgacaaaggcctctggtactgccacacatgcggcatcggaggaggcctcgccaaactgaaacaacaattagagaaagaaaacccgaatgtacgactcactacaaccctacaacattgcggaacgccgccgaatccagaaagcctcggccctctacgaaacccacctcgaaaacatactcgacctgctctcggcaagaggcatcagcgaagaaacagcccggctccaccaccttggatacatcgacaatgaccccatcccaggccacgaagactacaaccagtgcatcaccatcccatacatgtaccccgtctggggcggcccagccgaaatacgaaaaatgcgtttccgctgctcactccagcatgattgcgaaccccccaacccccccaaatatttgaccccggccggggaccccggctccagctacaacatggccgccatgcccaacccggcag

SEQ ID NO: 33 - DNA, 11726 bp, Pahexavirus sp.
  source 1..11726: mol_type = genomic DNA
ggacacgctagacgagtgcagcgaaatcctgtggttttgcgacagtgcaggacacccaaacaacagcaacacccgtggcaagcgcgaggaccagagcccctatgcaagccaggaagcactagactggctcgccggaatcgcataccaggccaaactattgcaggcggcagccgacgagatcatgtgggctatcatccgccaccgcgacaaccacaaaaacgttatcggccggaacgttctagaccaggccagcgatacgatctgcacctgcctccacctgtaccagatgctcgaagacaccatcgacagcaacgaattatagccacaccgcaatatacagaaatagtgccccagcggcaaccaccacacaatcgtggcagcaccgctggggcacacatctatattcacttatgcaacagtagactctaccgtgccaacctccgactcggccgcacggcgaggctcatagcctacaccaagatcagcatcatctgcaggctcgatcatgccaggatccgacacatcaaccatgtgcggctcaaccatgcccccatcgtcgggtggaacaagcccagcatccacaaccgtggttttaggtttgccggccacaaacgacggattaccaaacgaggtagccaccgacaacactgctgcaaccgacgcagtaatcaaggcagactcccacggcaaaccccgaaaagactcagccgtatatgtgacacccgccgtcacccccaacacagcaacaaacgtttgcacaaaagtcttagccgcccgctccagtaaacctaaccaaaactgtttacccacaacaaaccaccatcactttttcaaaccgttaacagtcgactcaagcctatcgatacggctgcgacactccagcacgtaataccagacactccacaaagcgtcttttgtgcgccacagcttcccggtcaccggattcttcacccacgacaaggcatcgacacgcttacccaagtcaccattctgcacctgcactacaccaacatcatggtgcagcttattcaccgaaccagtaagctgggcagacaattgtttaatctgatcatgcaatgctttcacatcagccacagttaactcctcactaccactatcattgccgcagactacggccataaatttgtcccacggaaaccacggccccggatcatcgtgatccgactggtgccacgcatccgtcacatccacgtggccgcaaacaccccgcctgccggccttcaaatcggctacgctaagcttcctctttggaacattatatttgtcacataaacgtctacacaggatggcggccttctctacggcaggccacacgcgagggtcaagccactgctcccgagtgtaagcatgccctggcacccggaatgaggcgtgcgagccgccatccgcgcaaatctctatacccaaactatgcggattcggcggggcatgccacccaatcgtagactccgacaggcactgcaccgtctcccccacatcacacacataatgcgccgaaccaccagacaatggggaagcaaaatagttcgccgtcgacaccgcccgccctttacgcgaggcagacggaaaacccacatccgggcacgtcgcatgaatcacaaccctattcaccggactattagaaccagccgagtgatgcgccgcaggaataaacctcaccacacaccaccaccaaacactaccaacatcagtaacacccttcctctctcacttgcggggatgacacggtaaccacaggtgatggtttcacactctcgcaggccaccgaacccgatatcgtggacgccacaccgtcactatatttcacaaacaggcggcccccggaacagtacacagacaccaccgaacgcccatctttaccatctttaccgtctttaccatcggatccgcgctcaccggccggacccggcacaccccgttcaccctgtgcaccttgcgggccggcaggacctgaagggcccacatcaccgcgctcaccggccggaccatcccgaccatcagcgccgtcaactccgttcacaccatcagcacctgcacgacctggaacaccatcatggccatccgaaccgttcgcgccaggcaacccgtcaggacctttcacaccattcaaaccaggggaaccctgcggaccaacagggccaaccagcccagccgaaccatcaacaccagccggcccctgcgggccctgcgggccacgtacaccagccggacccggaacaccctgcacactccgctcaacacgctgagcatccacacacaaaccagactggtgaagccgcacagactcctgcccgccagaagcacacacctgccgcacacgggcagccaaacccttggcagccgtaccatttgactgggctttagcctgctccgaatcccgctcagaggatacagccccgaaacgtaaagcacccgcagcaaccacagccaacagcacaagtgacaaaaacaacaacagcagggaagccttctcaaacgagcggcgctgccttttttcttcctccaactccctcaaccctactcacctccaccatcaacagtatctttcaaaaactcgggcacatcagggagatgcataggctccacatcatcaggaagcccggcgttaaaccttcgcacctctcgccgcacaccccacgtatactcttccatcgcatccaccagagccgacagccgccgcaaacgcctccgagatttagacgtgaccgcctgaacagaacccaaaaccgtggccaacgcggtacagatagaggccaccagtgcaggagtaaaccacgccaccacagccccccaacattacaacatcagccgcaacagcccggtcacacgccgacagcaatccagttagcaaccgcaggcacattagaaggcttagacccgtcattcgtgataaacgctaaactaaaatccttattagtaacattgtaggctttcacatcaatctgctgcgtaccaccagccgccgtagccatagacgccaccacaataggcggactactgaactggcgctcaaacggaatcgtgtaagcatacacagcagacccgccaaacatgatcgacttagaacccgtctcaatcctcggagacagtagcatccactcgccggcatgattagcccacacagccccagaaggaaccatcacccggtcaccctccacaggggtcgggtcacacgcagcagactccccaaacgccacacgagccgccacagcacgcctgtcaagctgctgctgcaacccgttagacgacaacaccaaagtagccaacagttgctgatggtacacgccaggctcagcccttaacacgtcacgggcacgctccgcacgccccccaggaacaatctccaacttggccgtattctgctcccaatcccgagacaggacaacatagtcgtatcgggtctcgccagggccaggcagctggcccgtcaccgtctcaacactattcgacgtgcacatcaccccgtgagcccaagcctgccccggcaggacctcacacaacactgtggcaccctgaacagtagtgcccacacgaaaatcatccgggcccttcacagacggcatattacccatcagaccagacatttgagcccaatcacactcggtcaacacaccatcaaaccctttacacacaatacccacaacaaacccccatcattctagaatttttgcaaatcccgcacacccgcagctaaaccagccacacgccgtgctagcaacgctgacggattatcctcataatcccccgcaacaggtgtcaccttcgtccaaccatcacccggcaaatcgcactccacatcaatctggcgcacaatctcagcaataggcccagagcccacatccacataaatcaaatctccaggcatcagattgcctggcccaaaccgcaacacatccgactccgccaactcgatcttaaaccccgacgtggcccctaactcggacaacacccgctccgcctcatcaatgagatgcacatgctcagaatccgtgttacgggcatccttaaacacctcgacacgatcaaaccactcatcctcggccaacgaatcaacatcctcacaaaacagccgatccttgccctcgccgcggccacccacaaccaccgaagtagccttaggggcgtcacgcacatactcccacgacacaatcgaacccgactcggcagtcaacacatgcgtccgggtcaccgccggcacacaatcaaacaacaaaccacgccgatccagcttcacattctcaaactgcttcaccgtgacagtcatccgagcccacgacaatatcggcaacagtttgtccgcaaacacgtgaaaccgggcctgaaaatcattaatgaaccgtccacgcttctcatcatcggtcagaaacacatccggcggaaaccgccacgcattatcccgcaacacctgcttagccaccgactccgccgcacccgaatagtgggcataatccctgtcggcacgccactccatacccaccaaaccgggacgataattcacaggccacatcaacatacgccacaacaggcggatatcatcctcacacgtgatagtcacccgcgaagaacgccacgggcccacaccgtgcaccttacgcacaggcccagaaaaaatctggccaccaccataatcaacaaccagccgtgcacccggcctcgtcaaaccgtcaagcctggaatgatccccagacaccaccaactccagcgtcgacaaaccattccacttcaacgacaacttcaacgactcaaaaaaattgataggcgccacacggcgataatccggcgtaaacaatgttacatgcggaacaagaccagccatcaactattcaccaagcccccaaaaacctgtactgcaccgacacaacaatggcacccaaaccaaccatctcaatattcacactcttagaaccgccaggcggaataggcgcaaactcccactccttcaaacgatccatcacatcctcaaacccgttcaacaatgcagactgtttgcgaggatccgtatcaatagtaatccaatcatactcctcaaccggatagtctgatgacacacgcaaaccatcaatctgcacagaccacgactccaaaggcccctcaacacgaatcacaggccacgcaggcacatcacccttattagacaggttatcccaacccgaaccaacaccaggcgacaacaccacaggaaacgccgtgccacccttgccgacagggccgccacccagccaatcctgcaactttgcgttactgaaacgaaacttctgctcatccccataccaaaacgggtcataggctgtcaaatgcaacagatagcgcgcatagccacgattcaccggatccaccgtaaacgtgtcatcaaccgaatcaaaccgacacttcaacacacgctcaacaccggcaggagtcttcaccgacaactcccccacctcgcccgggagaaacgcagaccacaactcgtcataggctttcaaaaaaccgtcacgaaacccgccatccggatccgggtcaacacccgacaccaacaccggcagcgtcacctcccgaggcttcacattaaacccgcgccactccgagccgtgcaccccaacatgcgtttgagaaaactgctccacctcaggaacacccaggccgcgcaacgaatcattcaacaacatgaccggagacgaccccgtataatccgtcaaatgaagcacacgctcgtcgccaaacagcggatccatagaccaagtaacagtcaaaccggcacgatccgacgagtcaggaagaaacatgcacaacacccccaatcacacgtaagccaacgcgttcaacgcgtcacgctgctgccgctcaacccgcttcgcaaactcgttaggatcaccataagtaggcccattcacattcaccacaacactcttatcattcgcacgctgatacctgccatacggggtaaacgagcccacagacaatcgcacaccaaaccgggcatcaaccgcatcaggcagccgtccagccacacccgacatcgcatccaacgccaaaccagcattaccagtaataccctcagccaaaccagcaacaacctggcggccaacctggtcacgaaacaccctagacggggaatgaatacccaacaccgacttcgccgcattagcaacctgagaacccatattacgcaccgtatccagtaggccactcatagcattccggataccattacccaaaccagacaccacatcacggccagcagacaccaacaaggaccccatattaccaagcgcacgccgaatattgccaggcaaattccggaaaaaacccagcacaccatgcacaccactagacacagcggaccccatagcatgcatagcactggaagccgcattccgggcaccattaaacccgcgcacagcaccactacgaaccctagacgccatcgaactgaaaaacccgccaacagcagacgccaccgaagacacaacactccgaatagcattcatcgcagaagaaacagcgccacgagccgcgttaaaaccagacctcacatgggcggcaaccgaagaaccaagccgggcaaaaaacccgacaaccgcgttcacgccgccagaaatgatcgacttgaaaccgttaataaacgctgacgtaaacgctctaatatgattccagccattcaagatggccgtgcccatagacctcacgccagacactaaatgattcacaacccatgagatgacacgggtgacagccccaacaatccgggctgcagcagacacaatagcgccaagaatacgtgcaacaaacccgataacagctgtcacaattggcatcacaaccggaataatgcgggccaccacctgcaacacaaccgaaacagcctgcaccaccacacgcataatcgacatgatcactggtatcagcgaccggatcaggccaataatgggtggcagcacagacatgacagcacccaaaatctgctgaatcacaggcatcaaaacaggcaccaactgcattatcgcaccaataacctgccgtatcacagccataacagcctgcaataccggcataagcgcgggcagcagcatggccgcaacctgcgtcacagcaccaataatctgtgtaatcacaggaaccagccgggcgacaagcatactaatcaaaggaacaatctgggcagccaaaccagcaaccaaaccaataatctgaccgaacaccggcgccaactgtgccaccagccccgcaactaaaccaaacagtggctgaatagcggccataatctggcccagggcttgaccaaccacagccacaagctgcatcaccgcggcacggaactgggcgttagtggcaaacattgccgcaaacaagccgatcacaatcccgacagggccacccagggcgcgaaacacgccgccaagcccgccggcggcacccctcaaagcaccaaacgacggcaacaaattcttcaacgcaaccgccaacggggcaaaccctgcaacaagcttccccacacccgcagcaacaataccgaacaccgctgtgccacccgcaaacatggcacccaaattcactttagggacaggcaaatgcaacctcgcaaaaatgcccttcaactgctcaaccttggcgcgcatctgtgcattcattctcgtaatcatgccaggcatacgattaatccacgccaaaatagacggcatcacccgctgaatcccctgatcaaccgacgcaaacatcggcttcacagaatccgtgatagacttgataaccggattcaacgcaacaaaaatctgccgcaacccgttaagaaacggcgccatagccgtagcaccaagataacccagggcacccttaacattcttcatagcgccctcaaacgtcttaccagacgcctgcgcagcaccacccatgccaagcttcatcgcagccgcaaacgcggcaaaatcaatttgccccttcgacaccatctgcgacacctcagccgacgttttacccgtctgcctggcaagcaaagacaacacaggaacaccagccatcgtaagctgcaacatgtcatcgccctgcaacttaccgcgggccatcacagacgtaaaaatagcgcccgtatcctgaaacgacttacccgaaatataagacacatcggcgacagtcttcaacacatccgtcatctgcccgccagacctcacaccagaagccgacaacgccgcagcagtcgaagccgcatcacccaaagcatacgacgtaccagtaacagcctcaatagccgaattcataatcgaagacgtatcagacgacgtatgacccaaaccagtcaacttagcctgagcctcatcaatagccatagcgcgagcaataccgccaccaatagtcacatcatagatagacttgagacccttcttagcaacattgatggcacccaccattgcggcgccaccaagcgccaacttcatacccttagcaaaaagactacccgaacgctgaccctcagcaggcatcaccccggacaactgtttaccaacatcagacttcaaaccgggcatcttcgtatacaacgacacatatgcgggagcaatctcaccagacatacactattcaccccataatattaatctcgcgagacaccccgccaccggcacgaacacgcgccaaaatatcgtccacctgcccagacgtaaaccgggccctacgctcatccgtaggcctcgccacaggctccggctgcccctcactattagcagacctgtaatgatccaacatgtccaacaccgcccactccgaccattcaaacggacgctgccaaccattcaggtgggccgccaactggctagacgtatcggtacacaacacgccagccagccggacagcctcaccccaacacattatcgggccaccaacatcataaaccgagcaaccgaaccgggtcctccaatcatattcgatggccccacgataatcatcaatcaggccgtggagccaaattattcccccagggaggaacctttaccttcaggcttgtattccatccactggcggaaaatctcggccacacgaaccataggaagcccctccagggcctccaccgcgtcggccggggcggcagcctccaacatagaaaacatcacctcaacctgggcgaaatccgcagactcccccgactgggcaatcttagctgcacggcgaaacacgcgggcaggaacagcctgagccgtctcctccgcatccgccaacacccagctacggtcaccaatcttcaacgtgtaacctgtgtcactcatctatcaacaatccctaaaatcgtgtatcagttctcagacggcggattaggatccggcttcggcgaaggaggaggcgtcggaggagtatcagcttttaaagccgtcatccacccccgacccgacaccgcattaccagtcttattaatctgggcaggataagccttcaacgtcacaccatacccgtacacttcgccattcttacccttgatctcgtcacgatcgataagctcaacctcggggaaatagtagcgaataacctgatcgccatccacaatatccatcaacagggcatgaaccccggtggtggcaccaggagaaatatcaaacgaacccgaatcggatccggcagtaaccttcgactgccaagacagctcgataacctccttcttcgactcgatcagctcgaaagaaatctcgatagacgactcagtagcaacagtgcgaaccacatccgcattctgccaagccttcaaatcatcagttttacgctccggcttaatcttaaacccgtcatccgacagataccctaaagctgtaagcccatcaggaaccgtcttcacaccatcaatagcgtcaccggcatgagctttaccaatatagacgtcacccgtaacagcagagcgaacattagacgctttacgtgttgcagccatcataacccccaaaaacaatcaaactaaaaatcaatcaacaaaaacaacgatacgcttactcggattcgacaggccgacacaccagctcaaaaagcgaatacacatcaaaacgtgcaccatcaaccagaagatcaggacccgtagaacgcctacaaaacaccaccggatcaccatcaaccccgtcagccagaacagcctcaacacgacgcgccaaagacatagcccgatcaggcgtatcagaaaacacattcacccgcaaaaaaacacgctcacgcacatgcaactgcgggccaccatccaacgcaagccaaatcaggtcaccctcaaagctatccggcactgtccctgtgcacggtatcccagacagccagccatcatccgccaacacacgtttagcccacttcctggggtcatcgtagacgatcacgacgcagccccaatcgacctagccagcgtgccatgcttcgcctcaatacgcttcccacccttataggtggtgccaatcctcgccacagcctcaacacggtgaacctgtacctccgacgacaagccattacgatactgggccttatcaaaagcgttaccgcccacattcgccgaggccgcacgcttgacacgctcgccacgctcagccaacatagcctgcaccccagaagacttcaacacctcacgaatacccgccaagttcagcttcacattcacatcctgagccacgaccaatcagcccttcttacgcttcacattgatctgcgtgcccgcatcccagccagatatcggatgatgccacacgataggggacccgtcagcctcccacacaacaccccgaatacgccaccggcaacgataatcagcgcccacaacaggggacttgaacagcatcgaccaatgctcataatccgagtcacgccccgcggcctcatcctcctgcgacaacgaagcatagatggccacgttatggtacacagtctcgacaggcttagaccagtcttccaccttgtcaccaagatcatcgacacgaacagttggttgaatcatcacaaccgtttcaccataaggaaaactggtcatatcatatctcccacaaagggccagcgtagccgttaatattcgacccgcacgaacaaccctcaccccacaccgtggaacacacctcagaatgattcacactactattcatggtcggtgtgatagtgaacgctttaccagccccaccatcaccctcacacaacttcttcaacgcagcaatctcagaacgccacaacaaattcgtaggcgtactagaccgtgtagtctgagcaaacgggcccgcagactcattctgcacctgacccgaaacgccagtatcattccagcgcaacaaagccctgcgcagaatcgccttagcggcatcccgatatttgaaatccggtttagcgatacagggggcgacactgacagccacagcctccacatcggcgatcatcgcctcaagcttctctctaggaatatcggcgaaaggctcaatatcctcaggcttcaaaatgatacccatcaacaccaccccctgcacatggacacatcaccgcaacaataaatcagttctcggccggcggattaggcttcggggcagccttctccttcaccacagcaaacgaatcaagcgactcaatcgcaacatacagcacagcctcggcacgaaccataacctcattatggcccttcaagtcacggccagtctgatccgggtcaccatactcgatcagctcgatcgggaagttacgctggaacccccaatgaacacgagagaaatcaccaacaatagccttaacaccagagg

SEQ ID NO: 34 - DNA, 17040 bp, Pahexavirus sp.
  source 1..17040: mol_type = genomic DNA
gatttatctcattaacgatcgtatccaaaggttgtcttcgttgaattgccgtattgagggctactatgagggctctaatcgggtgcgtgatttgggggtggctattccgccggagttgcagcgtgtgcagacggtggtgtcgtggcctggtatggctgtggatgctttggaggagcgtctggattggcttggctggactaatggtgacggctacggcttggatggtgtgtatgctgcgaatcggcttgctacggcgtcgtgtgatgttcaccttgatgcgctgatttttgggttgtcgtttgtggctgttattccccagggggatgggtcggtgttggttcgtccgcagtcgccgaagaattgtactggccggttttctgctgatgggtctcgtttggatgctggccttgtggtgcagcagacgtgtgatcctgaggttgttgaggcggagttgttgcttcctgatgtgattgttcaggtggagcggcgtgggtctcgtgagtgggttgagacgggccgtatcgttaatggtcttggtgcggttcctcttgtgcctattgtgaatcgtcgccgtacgtcgaggattgatggccgttcggagattacgaggtctattagggcttacactgatgaggctgtgcgcacactgttggggcagtctgtgaatcgtgatttttatgcgtatcctcagcgttgggtgactggcgtgagcgctgatgagttttcgcagcctggctgggtcctgtcgatggcttctgtgtgggctgtggataaggatgatgatggtgacactccgaatgtggggtcgtttcctgtcaattctcctacaccgtattcggatcagatgcgtttgttggctcagctgacggcgggtgaggctgcggttccggagcgctatttcgggtttatcacgtctaacccgcctagtggggaggcgttggctgctgaggagtctcggcttgtgaagcgtgccgaacgcaggcggacgtcgtttggtcagggctggctgtcggttggttttttggctgccagggcgcttgattcgagtgttgatgaggccgcgtttttcggtgatgtgggtttgaggtggcgtgatgcttcgacgccgactcgggcggctacggctgatgctgtgacgaagcttgttggtgccggtattcttccggcggattctcggacggtgttggagatgttggggcttgatgatgtgcaggttgaggctgtgatgcggcatcgtgccgagtctgcggatccgttggcggcgctggctggggctatttctcgtcaaactaacgaggtttgataggcgatggcttctggggttgcgtcgaggcttgctgcgactgagtaacagcgtgaggcggtcaggtttgctgggaagtatgcgggctattatgctgagcttggtcgtttgtggcattccgggaagatgacagatgcgcagtatgttcgtttgtgtgtggagttggagcgtgccggccatgatggttcggcatcgttggctgccaggtttgtgtcggattttcgacggttgaatggtgtggatcctggtttgattgtgtatgacgagtttgatgctgcggcggctttggcgaggtcgttttcgactatgaagattcttgagagtgacccggatagggcgaatgatactattgatgcgatggctgcgggtgttaatcgggctgtgatgaatgctggccgtgacacggttgagtggtctgcgggtgcgcagggtaggtcgtggcgcagggtgactgatggtgatccgtgtgctttttgtgccatgttggctacgaggtcggattatacgaccaaagagcgggcgcttactacgggtcatacgcggcgtcataagcgtgccggtaagcgtccgtttggttcgaagtatcatgatcattgtggttgtacggtggttgaggttgttggcccttgggaaccaaacagggctgatgccgcatatcagagaacgtacgagaaggctcgtgagtgggttgatgatcacgggttgcagcagtcgcctggcaatattttgaaggctatgcgtactgttggcgacatgagatgatggtttccggttgtgtgccgccggttatcggtgcacagggttgtctcccgcacgggggtcaacaatgttgtgttgttttccgcaaggagtgtagggttaggctatggccgatcaaaacagtgaaaaagaaaacatcaacaatgaagagaatgttgaacccggaaagggtaatggcattgttgatacagtaaaagacgatggcgggcaggaggtagccgacaatcagttgaagaatgaaggcgagggtaaaacgtctgggactgattggaaggctgaggctcgtaagtgggagtctcgtgctaaaagtaattttgccgagttggagaagcttcgcgcctcggatggtgatgcggggtctgtgattgatgatcttcgccgcaagaatgaggaactcgaagaccggattaacgggtttgttcttgagggtgtgaagcgcgaggtggcttcagagtgtggcctgtccagtgatgcgatcgctttcttgtcgggtggcgataaagagtcgcttgccgagtctgctaaggctttgaagggtttgatcgaccagagtggtggtggcgcgggtgtgcgccgtctcgcggggagtgcccccgttgatgatgttaaacgacgtgagggtgtcgcgtttgtggatgctcttgtccataattctaggagatgatttgtgatggctgacgattttctttctgcagggaagcttgagcttcctggttctatgattggtgcggttcgtgaccgtgctatcgattctggtgttttggcgaagctgtcgccggagcagccgactatttttggtcctgttaagggtgccgtgtttagtggtgttcctcgcgctaagattgttggtgagggtgaggttaagccttccgcgtctgttgatgtttcggcgtttactgcgcagcctattaaggttgtgactcagcagcgtgtctcggacgagtttatgtgggctgatgctgattatcgtctgggtgttttgcaggatctgatttcgccggctctgggcgcttctattggtcgcgctgtggatctgattgctttccacggtattgatcctgccactgggaagcctgccgcggctgtcaaggtgtcgctggataagacgaagaagacggttgatgccacggattccgctacgaccgatctggtcaaggctgtcggccttatcgctggggccggtttgcaggttcctaacggtgttgctttggatccggcgttctcgtttgccctgtcgactgaggtgtatccgaaggggtctccgcttgccggtcagcctatgtatcctgccgccgggtttgccggtttggatgattggcgcggcctgaatgttggtgcttcttcgactgtttctggcgccccggagatgtcgcctgcctctggtgttaaggctattgttggtgatttctcgcgtgttcattggggtttccagcgtaacttcccgatcgaactgatcgagtatggtgacccggatcagactgggcgtgacctgaagggccataatgaggttatggttcgtgccgaggctgtcctgtatgtggctatcgagtcgcttgactcgtttgctattgtgaaggagaaggctgccccgaagcctaatcctccggctggtaactgatctatttgttgcgataatgttcatgctgtgtgcagggggtggagttgatgggtatcattttgaagcctgaggatattgagcctttcgccgatattcctagagagaagcttgaggcgatgatcgccgatgtggaggctgtggctgtcagtgtcgccccctgtatcgctaaaccggatttcaaatatagggatgctgctaaggctatcctacgtagggctttgctgcgctggaatgataccggcgtgtcgggtcaggtgcagtatgagatggcggggccgtcctcccagactacacggtctaatacgcccacgaacctcctgtggccttccgagattgccgcgttgaagaagttgtgtgagggtgatggtggggctggtaaagcgttcactatcacaccgaccattcatggcggatatgcacactctgaggtgtgttctactgtgtggggtgagggttgctcgtgcggatcgaatattaacggctacgctggccctttgtgggagatatgatatgaccagttttcctcacggtgaaacggttgtgatgcttcaaccgactgttcgtgtcgatgatttgggcgacaaggtggaagactggtctaagcctgtcgagactgtgtaccataacgtggccatctatgcttccgtttcgcaggaggatgaggccgcggggcgtgactctgactatgagcattggtcgatgctgttcaagcagcctattgtgggtgctgattatcgttgccggtggcgtattcggggtgttgtgtgggaggctgacgggtctcctatggtgtggcatcaccccatgtctggctgggatgctggtacgcaggttaatgtgaagcgtaagaagggctgatgggtagtggctcaggatgttaatgtgaagctgaacttgccgggtattcgtgaggtgttgaagtcttctggggtgcaggcgatgttggctgagcgtggcgagcgtgtgaggcgtgcggcctcggcgaatgtgggcggtaacgctttcgacaaggcccagtatcgtgcagggttatcatcggaggtgcagattcaccgtgttgaggctgtggcccgtattggcaccacatataagggtgggaagcgtattgaggcgaagcatggcacgctggcccggtcgattggggctgcgtcgtgatcgtctacgatgaccccaggaagtgggctaaacgtgtgttggcggatgatggctggctgtctgggataccgtgtacagggacggtgcctgaggatttcagcggtgacctggtctggttggcgttggatggtggtccgcagttgcatgttcgtgagcaggtgtttttgcgggtgaacgtgttttcggatactccggatagggctatgtctttgtcgcgtcgtgttgaggctgttctggctgatggtgtggacggtgaccctgtggtgtactgtaaacggtctactggccctgatttgctggttgatggtgcacgttttgatgtgtattcgctttttgagcttatatgaaggcctgcggagtctgaataagcttattgtttttgttttaatgtaattgtctgatatttaatgggggttatgatggctgcaacacgtaaagcgtctaatgttcgctctgctgttacgggtgacgtctatattggtaaagctcacgctggtgacactattgatggtgtgaagacggttccggatgggttgactgctttagggtatctgtcggatgatgggtttaagattaagcctgagcgtaaaacggatgatttgaaggcttggcagaatgcggatgttgttcgcactgtggctaccgagtcttcgatcgaaatctctttccagctgatcgaggcgaagaaggaggttatcgagctgttttggcagtcgaaggttactgccggagccgatgcgggttcgttcgatatttcaccgggtgccacgacgggtgttcatgccctgtttatggatattattgatggcgatcaggttattcgctactatttccctgaggttgagttgattgatcgtgatgagattaagggtaagaatggcgaggtgtatggggatggtgtgacgttgaaggcgtatcctgcccagattaataagaagggtgatgcggtgtctggtcggggggggatgacggctttaaaagctgatactcccccggttcctccttctccgaagccggagcctcctaagcctgagccggatccgaatccgccgtctaataactgatacacatagtttgagggattgttgatagaggagtgacacaggttacacgttgaagattggtgaccgtagctgggtgttggcggatgcggaggaaacagcgcaggctgttcctgcccgcgtttttcgccgtgccgccaggattgcccagtctggggagtctgcggatttcgcccaggttgaggtgatgttttctatgttggaggctgccgccccagctgacgcggtggaggctctggaggggcttcctatggttcgtgttgccgagattttccgccagtggatggaatggaagcccgaccagaaagcggcctccttgggggaatagtttggctccacggcctgattgatgattatcgtggggccatcgaatatgattggaggaccaggttcggttgctcggtttatgatgttggtggcccggtgatgtgttggggtgaggctgttcggctggctggcgtgttgtgtaccgatacgtctagccagttggcggcccaccttaatggttggcagcgcccgtttgagtggtctgagtgggcggtgttggacatgttggatcattacaggtctgctaatagtgaggggcagccggagcctgtggcgaggcctacggatgagcgtagggcccggtttacgtctgggcaggtggacgatattttggcgcgtgttcgtgccggtggcggggtgtctcgcgagattaatattatggggtgaatagtgtatgtctggtgagattgcttccgcctatgtgtcgttgtatacgaagatgccgggtttgaaggcggatgttggtaaacagttgtcgggtgtgatgcctgctgagggtcagcgttcgggtagcctgtttgctagcgggatgaagttggctttgggtggcgctgcgatgatgggtgccatcaatgttgctaagaagggcctcaagtctatctatgatgtgactattggtggcggtattgctagggcgatggctattgatgaggctcaggctaaactgactggtttgggtcacacgtcttctgacacgtcttcgattatgaattcggctattgaggctgtgactggtacgtcgtatgcgttgggggatgcggcgtctacggctgcggcgttgtctgcttcgggtgtgaagtctggcgggcagatgacggatgtgttgaagactatcgcggatgtgtcttatatttcgggtaagtcgtttcaggatacgggcgctatttttacgtcggttatggcgcgcggtaagttgcagggcgatgacatgttgcagcttacgatggcgggtgctcctgtgctgtctctgttggctaggcagactggtaaaacgtctgctgaggtgtcgcagatggtgtcgaaggggcagattgattttaacacgtttgcggctgcgatgaagcttggcatgggtggtgctgcgcaggcgtctggtaagacgtctgagggcgctatgaagaatgtgaagagcgccctgggctatcttggtgctacggctatggccccgtttttgaacggtttgcagcagatttttgttgcgttgaatccggtgatcaagtcggtgacggattctgtgaagcctttgtttgcgtcggtggatcagggtattcagcggatgatgccgtctattttggcgtggattagccggatgccggctatgatcacaagaatgaatgcacagatgcgcgccaaggtggagcagttgaagggcatttttgcaaggttgcatttgcctgtccctaaagtgaatttggctgccatgtttgctggcggcacagcagtgttcggtattgttgctgcgggtgtggggaagcttgttgcggggtttgccccgttggcggtgtcgttgaagaatctgttgccgtcgtttggtgctttgaagggtgccgctggcggtctgggcggcgtgtttcgcgccctgggtggccctgtcggtattgtgatcggcttgtttgctgccatgtttgccactaacgcccagtttcgtgcctctgtgatgcagcttgtgggtgttgtaggtcaggctttgggccagattatggccgctatccagccgctgtttggtttagttgccgggctggttgcacggttggctcccgtttttggccagattattggtttggtggctggtttggctgcccagctggtgcctttgattagtatgctggttgcccggctggtgcctgtgatcacgcagattattggtgcggtgacgcaggttgctgccatgttgttgcctgcgcttatgccggtgttgcaggctggtgtggctgtgatacgtcaggttgttggcgtggttatgcagttggtgccggtggtgatgccggtgattcaacagattttgggtgctgtcatgtctgtgctgccaccgattattggccttatccggtcgttgataccagtcatcatgtctgttatgcgtgtggtggttcaggttgttgcggttgtgttgcaggtggtggcccgtattcttgctgttgtggctccgatggtggcggccgtggtcgggtttgttgcccgtattgttggtgctgtcgtgtcggctgtggcccgtgttattgccgctgttgcccgtgttgttggatgggttgtggctcatttggtgtctggtgtggcgcgtatgggttcggtggttcaggctggctggaatcatattagggcgtttacgtctgcgtttattaacggtttcaagtcggtgatttctggcggcgtgaacgcggttgtcgggttttttgcgcggatgggttcttcggttgcttctcatgtgaggtctgggtttggcgcggctcgtggtgctgtttcggctgcgatgaatgggattcggagtgttgtgtcttcggtggtgtccgcggtgggctcgttttttggttcgatggcttctagggttcgtggtgctgcctcgtctgggtttaacggggccaggagtgtggcttcttctgctatgcatgctatggggtctgcggtgtcttccggtgtgcatagtgtgttagggtttttccggaatctgcccggcaatattaggggcgccttgggtaacatggggtctctgttggtgtctgctggccgtgatgtggtgtctggtttgggtaatggtatccggaatgctatgagtggcttgttggatacggtgcgtaatatgggttctcaggttgcgaatgcggcgaagtcggtgttgggtattcattccccgtctcgggtgtttcgtgaccaggttggccggcaggttgttgccggtttggctgaggggatcactggtaacgcgggtttggcgttggatgctatgtcgggtgtggctggccggcttccggatgcggttgatgcccggtttggtgtgcgatcatcggtgggctcgtttaccccgtacgaccggtatcagcgtgccaagggtgagagtgttgtggtgaatgtgaacggtcccacgtatggtgatcctgccgagtttgcgaagcggattgagcgtcagcagcgtgacgctttgaacgcgttggcttacatgtgagtaaaggggtatgcatgtttattcctgacccgtctgatcgttctggtttgactgagacatggtcgatggatccgcggtttggcgatgagcgtgtgcttcatttgacggattatacggggtcgtctccggtgatgttgttgaatgattcgttgcgcggtttgggtgttcctgaggttgagcatttttctcaaactcatgttggggtgcacggctcggagtggcgcgggtttaatgtgaagcctcgcgaggtgacgctgccggtgttggtgtcgggtgttgacccggatccggatggcgggtttcgtgacggttttttgaaggcgtatgacgagttgtggtctgcgtttcccccgggcgaggtgggggagttgtcggtgaagacccctgccggccgtgagcgtgtgctgaaatgccggtttgattcggctgatgacacgtttacggtggatccggtgaaccgcggttatgcgcgttatctgttgcatttgacggcttatgacccgttttggtatggggatgagcagaggtttcgtttcagtaacgcgaagttgcaggattggttgggtggcggccctgttaataagaagggtacagcgtttccggtggtgttgacgcctggtgttggttcgggctgggataatttgtcgaataagggtgatgtgcctgcgtggcctgtgattcgtgttgagggcccgttggagtcgtggtctgtgcagattgatggtttgcgtgtgtcttcggattacccggtagaggagtatgattggatcactattgatacggatcctcgccagcagtctgcgttgttgaaccggtttgaggatgtgatggatcgtttgacagagtgggagtttgcgcctatcccgcctggcggttcgaagagtgtgaatattgagatggttggtttgggtgccattgttgtgtcagtgcggtacaggtttttgagggcttggtgagtggttgatggctggtcttgttccgcatgtaacattgtttacgccggattatcgccgggtggcgcctatcaatttttttgagtcgttgaaactgtcgttgaagtggaatggtttgtcgacgttggatttggtggtgtcgggtgatcattcgaggctcgacgggttgactaggcctggggcgcggctggttgttgattatggtggtggccagattttttcggggcctgtgcgtaaggtgcacggggttgggccttggcagtcctcgaaggtgactgtgacgtgtgaggatgatatccgcctgttgtggcgtatgctgatgtggcctatcaattatcgtcctagttttgtgggttcggagtggcgtgctgaccgggattatgcccattattcgggtccggcggagtcggtggctaagaaggtgttgcgggataatgcgtggcggtttccgccggatgtgtttctgatcgatgatgagaagcgtggacggttcattaatgattttcaggcccggtttcacgtgtttgcggacaaactgttgccgatattgtcgtgggctcggatgactgtcacggtgaagcagtttgagaatgtgaagctggatcggcgtggtttgttgtttgattgtgtgccggcggtgacccggacgcatgtgttgactgccgagtcgggttcgattgtgtcgtgggagtatgtgagggatgcccctaaggcgacgtcggtggttgtgggtggccgcggcgagggcaaggatcggctgttttgcgaggatgttgattcgatggccgaggatgagtggtttgatcgtgtcgaggtgtttaaggatgcccgtaacacggattccgagaaggtgtctctttacgatgaggctgagcaggtgctgcaagagttgggggccacgtcggggtttaagatcaagttggctgagtcggatgtgttgcgttttgggccaggcaacctgatgcctggggatttgatctatgtggatgtgggttctggccctatcgcggagattgttcggcagattgatgtggagtgtgattcgccgggggacgggtggacgaaggtgactcctgttgcgggggattatgaggacaatccgtcggcgttgctagcacggcgtgtggctggtttggctgcgggtgtgcgagatttgcaaaaattctagaatgatgggggtttgttgtggatattgtgtgtaaagggtttgatggtgtgttgaccgagtatgattgggctcaaatgtctggtctgatgggtaatatgccgtccgtgaaagggccggacgattttcgtgtcggcacgacgatccagggtgccacagtgttgtgtgaggttttgccggggcaggcttgggctcacggggtgatgtgcacttctaatagtgttgagacggtgacggggcagctgccgggccctggcgagacccgatacgactatgtggtgttgtctcgggattgggagcagaatacggccaagttggagattgttccgggtggccgtgcggagcgtgcccgtgacgtgttaagggctgagcctggcgtgtaccatcagcagttgttggcgactttggtgttgtcgtctaacgggttgcagcagcagttggataggcgtgctgtggcggcccgtgtggcgtttggggagtctgctgcgtgtgaccctaccccggtggagggtgaccgggtgatggttccttcgggggctgtgtgggctaatcatgctaacgagtggatgctgttgtcccccaggatcgagacgggttcgaagtcgatcatgtttggtgggtctgctgtgtgtgcttacacgatcccgtttgatcgccccttcgagagtgcgcctgttgtggtggcttctatgggcacggcggctggtggtacgcagcagattgatgtgaaagcctacaatattactaataaggattttggtttggcgtttatcacgaatgacggttcgaagccttctggtgtgcccgcgatagctaattggattgctgtcggcgtgtgaccgggctgttgctgctgatgctgtaatgttggggggctgtggtgtcgtggattactcctgcactggtggcttctatctgtacggcgttggccacggttttgggttctgttcaggcgatcacgtctaaatctcggaggcgtttgcggcggctgtcggctcaggtggatgctttggaggagtatgtgtggggtgtgcggcgtacggttcgccggtttaacgccgggcttcctggtgatgtggagcctatgcatctccctgatgtgcctgagtttttgaaggatactgttgatggtggaggtgagtagggttgagggagttggaggaggagaagcggcagcgccgctcgtttgagaaagcttccctgctgttgttgtttttgtcgcttgtgttgttggcggtggttgctgggggtgctttgcggtatggttctgtgggttcgcaaagggattcggagctggctaaagcccagtctaatggtacagcggctcggggtttagccagccgtgtgaagcgggtgtgtgcctctggcgggcaggagtcggcgcgtcttcaccggtctggcttgtgtgtggatgctcggcgtgttgagcgtagtgtgcagggtgtgcctggccctgccggtgtacagggcccgcaaggccctgccggggttgacggccgggatggtgttaatggttcggctgggctggttggccccgttggtccgcagggttccccgggtttgaatggtgtgaaaggtcctgacgggttgcctggcgcgaatggatcggatggccgtgatggtgttgctggtgtgaacggggctgatggtaaagatggcgtgccaggtagggatggcgctgatggtggccgtggtcctgccggtgagcgcggcgaacaaggtccatcgggtcctgccggcccgcagggtgcacagggtgacaggggtgagcgtggacctgccggcgatgatggtgctaatggcaaggatggtgctgacgggcatgatggtcgtgatgggcgctcggtggtgtctgtgtactgttccgggggccgcctgatggtgaaatatagtgacggtaaggcctctaccgtgtcgggtcctgcggcctgccaggatgtgaaaccatcacctgtggttaccgtatcatcccataggtgaacaagaagagggaagggtgttactagtgttggtcgtgtttggtggtggtgtgtggtgagatacattccagcggcgcatcactctgccggttcgaatagtccggtgaatagggttgtgattaatgcaacatgcccggatgtggggtttccgtccgcttcgcgtaaggggcgggcggtgtctacagcgaactatttcgcgtccccatcgtcgggcggttcggcgcattacgtgtgtgatattggggagacggtgcagtgcctgtccgagtctacgattggctggcatgcccccccgaatccgcatagtttgggtatcgagatttgcgcggatgggggttcgcacgcctcgtttcgggtgccggggcatgcttacactcgtgagcagtggcttgatccgagggtgtggcctgcggtggagcgtgccgctatcctgtgtcggcagttgtgtgacaagcatggtgttccgaagaggaaactgtctgtggccgatctgaaagcgggtaggcggggcatgtgcgggcacactggtgtgacggatgcgtggcatcagtcggatcatgacgatccggggccgtggtttccgtgggacaaatttatggctgtggtgaatggccacggcgggggttcaagtagtgaggagttgagtatggctgatgtacaagcgttacataatcagattaaacagttgtcggcacaggtggcccagtcggtgaataagctgcatcacgatgttggtgtggttcaggttcagaatggtgatttgagtaaacgtgttgatgccctgtcgtgggtgaagaatccggtgacggggaagctgtggcgcaccaaggatgccctgtggagtgtctggtattacgtgctggagtgtcgcagccgcatcagtaggcttgagtctgctgttaacggtttgaaaaagtgacggtggtttgttgtgggtaaacagttttggttaggtttactggagcgggcggctaagacttttgtgcaaacgtttgttgcggtgttgggggtgacggcgggtgtcacgtatactgcggagtcgtttcgcggtttgccgtgggagtctgccctgattacagcaacggtggctgcggtgctgtcggttgctacctcgtttggtagcccgtcgtttgtggccggtaagccgaaaactacgcctgtggatgctgggcttgttccacccgacgatgggggcttggttgagccgcactcggtggatgtgtcggatccgggcatgatcgagccgaaggatgatgctgattttggtggctatgagccgaggcgtgccgccgagtcggaggttggcacggtagagtctactgttgcataattgaatatgtgtgtgccccagcggtgctgccacgattgtgtggtggttgccgctggggcactctttttgtttatgcggtgtggctatgattcgttgctgtcgatggtgtcttcgagcatctgatacaggtggaggcaggtagagatagtttcgttggcctggtgcagaacatcctggccgataatgtttttgtggttgtcgcggtggcggatgatagcctgcatgatatcgtcggcttccgcttgcaatagtttggcctggtatgcgattccggcgagccaatctatggcttcctggcttgcccgtgtgtcgtctggaatgccacgggtgttgctgttgtttgggtgtcctgcactgtcgcagtcccacaggatttcgctgcactcgtctagcgtgtcctggtcgatagcgagatcgtcgaggctgacttctttgacggtaaggttcacattgtcgagtgagatgggtacatggtactggttttcgataccggcaacaatgttttccaactgttgcatgttggtgggttgttgttggatgattcggtgtactgctgtttttagggcagtgtggaggatattggttgtgttgttcatggttttattccatccctgcgctgtcgtcttggtagtatcgactgtttgcgtatcctgtgagggtgatcaatgtttggtctgcccactgtttcacagtctgtcttgtcaccccgagtctctgggcggccgacgcatatgtttggtcgtacccgtagacttcccggaatgctgccaaccgtgccaaatgttttcgctgtttggatggctggcaggtgagggtgtagtcgtcgatggccagttgtagatcgatcatggtgacaatgttgttgccgtgatgctggggggcggttggtggtggtggcattcctggttcgacgctgggtttccatgggccgccgttccagatccattgggcggcttggatgatgtcggctgtggtgtaggtttggttcactggtcaccccttgaacaggttgtcgaggttgtctgggttgctggtggtggtgtcgaatcgtccgacgcagtggcagtagtcgtacatgagtttgataatgtgttggtggtctcccaaataggtgtttccgctgatgctgtaggtggctgtgccgtctttactgatggtgtatttggcggtgatggtttcggggttttcggtgtcggtgatgatggctgtggtggtggcgcctactgtttggagcacggtggtttgggttccgtcgtcgatggtggttttcaccatgaggggttctccttctagttgcttgtttggttgtcggctagatgaatgatatcgggtaaaggtttcggttggtcgaggtgttgtgtggttttgttggctagccgtttggctaccctgtagcacattttggtgtagtgtttgtcgtctaggttgtggtattgttcacgcaccgcaatatatagtagggagtcttggtagaggtcgtctgcgctgattgcggggtagtgtgtggctgttttggtgcatgcccggttgagtgtgcgtagatgatggcctgtggcccacacccacgatgcggtggtggcgaggtctgcttttgttggtcgtctactcatggtttttatctggctatctggtagttgtttggtgttttgttgttgatagtgtagcacacgagtccggggttgccgttggtgcccgtcttgtgccggtaccagacggattctccttccatggatgggcattggatgaaggtgcgttgtccttgctcggagatttctaggtggtgccggtgccctgccatgaggatgtgggatgtggtgccgttgtggaattcttggccgcgccaccattcgtagtgtttgccggtgcgccattggtgtccgtgggcgtgcagtatttgtgtgcctgccacgtcgacggtggtggtcatttcgtctcggctggggaaataaaagtgtaggttggggtattggttgttgagctggtaggcttctgcgatggcgctgcagcagtctacgtcgaaggagtcgtcgtaggtggtgacgcctttgccgaagcgtacggcttctccgtggttgcctgggatggatgtgatggtgacgttttggcagtggtcgaacatgtgtacgagttgcatcatggccatgcgggtgagccggatttgttcggtaaggggtgtttgtgtgcgccaggcgttgttgcctccttgtgacacgtatccttcgatcatgtc

SEQ ID NO: 35 - DNA, 5626 bp, Pahexavirus sp.
  source 1..5626: mol_type = genomic DNA
atcccatccctgtgctgtcgtcgttttcgtctggcatgtagtatgtgctgtttgcgtactcggttaacgtcatcagtgtttggtctgcccactgtttcacggtttgtcttgtcacacccaatcgttgggctgccaccgaataggtttggtcatacccgtatacttcacggaacgctgccaacctagctagccgtttcctttgtttggatggctggcaggtgagggtgtagtcgtcgatggctagctgcaaatcgatcatggagacaatgttgttgccgtggtgttgtggcgcggttggtgggggtggcatgcccggctccacgctcggtttccatggtccgccgttccagatccattgcgcggcttggataatgtcggcggtagtgtaggttcggttcatgtgtcatcccctgagcaggttgtcgaggttgtctgggttgctggtgttggtggtgtcgaatcgtcccacacagtggcagtagtcgtacatgagtttgataatgtgttggtggtctcccaaataggtgtttccgctgatgctgtaggtggctgttccgtctttgctgatggtgtattttgcggtgatggtttcggggttttcggtgttggtgatgattgctgtggtggtggcgcctactgtttggagtatggtggtttgggttccgtcgtcgaggatggttttaaccattggggggttctccttttaaatgctgatttggttgtcggctagatgaataatatcggataaaggtttcggctggtctaggtgttgtattgttttgttggctagccgtttggctaccctgtaacacattttggtgtagtgtttgttgtctaggttgtggtattgttcccgcaccgcaatatatagtagggagtcttggtacaggtcgtctgcactgattgcggggtagtgtgtggctactttggtgcatgcccggttgagtgtgcgaagatgatggtctgtggcccatccccacgatgcggtggtggccaggtctgcttttgttggtcgtctgctcatggcactattacctggctatctggtagttgtttggtgttttgttgtggatagtgtagcacactagtccggggtggccggtggtgcctgtgcggtgccggtaccatgtggattcgccttccatggatgggcattggatgaaggtgcgttgtccttgctcggagatttctaggtggtgccggtgccctgccatgagtatatgggatgtggtaccgttgtggaattcttggccgcgccaccattcgtagtgttggttgttgcgccattggtgtccgtgggcgtctaggatttgtgtgcctgccacgtcgacggtggtggtcatttcgtcccgctcggggaagtggaagtggatgttgggatactggttggtgagctggtaggcttctgcgatggcgcggcagcagtccacgtcgaaggagtcatcgtaggtggtgactcctttgccgaagcgtactgcttcaccgtgattgccggggatggaggttacggtgacgttggcgcagtggtcgaattggtggatgagttgcatcatggccatgcgggtgagcctgatttgttccgtcaagggtgtttgtgtgcgccaggcgttgttgcctccttgtgacacgtatccttcgatcatgtcgccgaggaaggcgatgtggactcgttgcggctgtccggcttgttgccagtagtgtttggcggcggtgagtgagtgtaggtagtcgtctgcgaagtgtgcggtttcaccttgggggatgcctttgccgatttggaagtcgcctgccccgaccacgaacgcggtctcgtcattgctgtgggtgttggtttctggtttggggggtttccattcggctagtttgttgacgagttcgtcgatcgggtaggggtcggttgcgggttggtggtcgatgattttttgtatggatcggccggtttctccgttcggtaaggtccattcggagatgcgtgtgcgccgtacggtgccgttggcgagattgtcgtcgatggtgtcgatggcgttgtcgtggttggctagctgtgtgaggagccggtctatgttgtcgatcattggttgtcccctcctttactgttgagtttgcggcggtagtctttgatgacggtggcggagatggggtatcctgcctgggtgagctgttttgctagccatgaggcggggatagacctgtcggcgagcacgtctgcagccttgttgccgtagcgttgaataagggtttcagttttggttgccatgatgtcctatcggttgtgtggtgggttgccatcctgtgctgcagtcgccgtcgtgtcctggtttgcgtgtgcaccacgatagggttccgtctgtgtggttgagtgtttttccgcacatgacgttttgtaaatgctctggcagctgctccgggttgttatcgttttgtgtgtcgaagagggttttttgtttggtgaagtgttcggatactgttccgttgtgtacgggtagtatccatgttttccattgttgttgtagtcgggtgttccagtggaattgtttggcggcgttttctgcctgttttatggttttgtagtagccgacgagtatgcgctggtgttgctggtcgggcgggttttggcctcgccagtattgtgccgcgacggcgtaccggttgttgtcggtgaaggtgttccagcagtattggatgatgttgttgagggtgtcatctggcagatcatctgggttgaggttggtggcctgggtgaggatgtctcggatggtttgaaggttgcgttttgtgggtttgaacgagatgctcacgatagtgccggctgttcgtcttgcatgaactggttgaaggtgttgttcccggcatgttgggcttgtgtgatttgctggtcggtccagtcggggtgttgctgtttcagatagtgccagcggcacgcattgtaggtttcgttttgtagccgggtgagatggttttcggtgatgatttgtttccacatggcccatgacacgtcgagccggttgaggatttcgagggctgggatgttgaattggtcgaggaagaggatttcgtgggtgtagtagtttttctcgtattggtcccatccgcttcggtgcctgttgggctggtttttggggtaggctttccggcagattttgtgtaaccgtttggccatgtcgtcgggtagtttaatgtcggggttggcgcggatcatggatcgcatcccatcataggtggtgccccaggtgtgcatgatgtaggtggggtcttcaccatcggtccatttttctgcacagatggcgaggcggatacgcctcctggctgcttggctggtgttgcggcggccggggatggggcacgtgtcgaggggatccatggtgttttatatgcctttctttgtttaggttgcttatgtggttttactgtagcacagtgtctagtgcttgtgtcaaccctgttgttccttcctgtaggtaggtgtctgtgacatccccgagggtgaggggcacgtgtacggcttgggggagtgctgcctggatggtttgtgccatctggtggcctgcagggtccggatcagaccagatgtaaacatggtcgtagccttcaaaaaatttggtccaaaagttttgccacgaggttgcgccgggtagggcgacggccgagcatccgcattgttcgaggatcatggagtcgaattcgccttcacaaatgtgcatttcggctgccgggttggccatggctgccatgttgtagatggagcctgtgtccccggccggtgtcaagtatttggggtggttgtgggttttgcagtcgtgcgggagtgagcagcggaaacgcatttttcgtatttcggctggcccttcccagacggggtacatgtatgggatggtgacgcactggttgtagttttcgtggcctgggatggggtcattgtcgatgtatccaaggtggtggtagcgggctgtttcttcgctgatgcctcttgccgagaggaggtcgagtatgttttcgaggtgggtttcgtagagggccgaggctttctggattcggcggcgttccgcaatgttgtaggggcgtatgctgtcgtacattcgggttttctttctctaattgttgttgtagtttggtgtgtccgcctccgataccgcatgtgtggcagtaccagacgcccttgtcgaggttgatgctcatggagggctggtggtcgtcgtggaacgggcagaggatgtgttgctcgttcctggacggattgtagcgtatctggtaggtgtcgaggaggcggcgggtgtcaggggtgtgggaggagctcgttgagggttgataccacataggcttcgctccagggtttgttgcgctgtttcatcactacgagtccgatggcggactggttttcgcggtttcggtgggtttcatagttgcgtgcctcccggctggcttgtttcacgaattcggcgaggtgtggctggccggctttcgcttcgatcacataggtgtggttgctggttgtgaggatgaggtcgccttcgtcctctttaccgttgaggtggaggcgttctatatcatggccggtgtcgcgtagctggtgtaggagtcgtgtttcccattcggctccggcccgccggttgcgtgcctgttgtgtagccatcatagtcctttgtgtgttgtggtcatgttccatggctgtttttctaccagggggccgaagaatgtgtattcggggtaggctcgtagccgttcgtatcgggtgccgtcggggctggatttgccggtgcgctgtttgagtacggcgatgcgtgcctcggcggggatggtgagtccgttgccgttatcctcgccaccatacaatgagactccgaggatgagttgtggtttttcggagaggccgtttttgatttccctgcgtgctggcgggtgttcgatgtcggttccggttttgtcggttgcgtggtgggtgacaataatggtggagccagtatccctgcctaatgctgtgatccattgcatggcttcttgctgtgcctggtagtcggattcgcagtcttgaatgtccatcaggttgtcgataacaatgagtggtgggaaagtgttccacatttccatgtaggcttgcagctccatggtgatgtcggtccatgtgatgggtgactggaatgagaatgtgatgtgttggccgtggtggatgctgtctcgatagtattctggcccgtaggtgtcaatgttttgttgtatctgtgtggtggtgtgttgggtgttgagggagatgattcgtgtggaggcctcccagggtgtcatgtcccctgatatgtagagggcgggctggttgagcatcgctgtgatgaacatggctagccctgatttttggctgccggaccgccccgcgatcatgactaggtcccctttgtggatgtgcatgtcctggttgcggtagaggggttctagctggggtatgcggggcagctcggcggcggtttgggaggctctctcgaaggatcgttgtagagagagcatcggagcctttatctatctgttacggtttgggaggctctctcgaaggatcgttggagagagagcatcggagccttaatctatctgtcggtttggttgttggtggtcagatggagtcgatgtctacatcatcact

SEQ ID NO: 36 - DNA, 9539 bp, Pahexavirus sp.
  source 1..9539: mol_type = genomic DNA
gtttggtggtggtgtgtggtgatgtttattcctgcggcgcatcattcggccggttcgaatagtccggtgaaccgggttgtgattcatgcaacatgcccgtatgtggggtttccgtctgcctcgcgtaaagggcgggcggtgtccacggcaaactatttcgcgtccccatcgtctggtggttcggcgcattacgtctgcgatattggggagacggtgcagtgcttgtcggagtctacgattgggtggcatgccccgccgaatccgcatagtttgggtttcgagatttgcgcggatgggggttcgcacgcctcgttccgtgtgccagggcatgcttacactcgtgagcagtggcttgatcctcgggtgtggcccgctgtggagcgtgccgctatcctgtgccggcagttgtgtgacaagcatggtgtcccgaaaaggaagcttagtgcagccgatttgaaggctggcaggcggggcatctgcgggcatactgacgtgacggatgcgtggcatcagtcggatcatgatgatcctgggccgtggtttccgtgggacaaatttatggccgtcgtgaacggcggtagtggagagagtgaggagttgagtatggctgatatacaagcgttacataatcagattaaacagttgtctgggcaggtggcccagtcggtgaacaagctgcaccatgatgtgggtgtggttcaggtgcagaatggtgacctggcgcgccgtgtgggggctttgtcgtgggtgaagaatccggtgacggggaagcagtggcgcaccaaggatgcgttgtggagtgtctggtattacgtgctggagtgtcgtagccgtatcagcaggctcgagtctgctgtcaacgatttgaaaaagtgatggtggtttgttgtgggtaaacagttttggttgggcttgtttgagcgtgccctgaaaacttttattcaaacgtttgttgctgtgcttggggttactgcgggtgtcacatatactgcggagtcgtttcgcggtttgccgtgggagtctgccctgatcacggctacggttgctgcagtcctgtcggttgctacctcgtttggtagcccgtcgtttgtggccggcaagcctaaaaccacgcctgtggatgcgggtttggttccaccggatgatgggggcttggttgagccgcactcggtggatgtgtcggatcctggcatgattgagccgattgatgatgcggatcttggtgtaggctatgtgccgaaacacgctgccgagtcggaggttgggacggtagagtctactgttgcataattgaacatagatgtgtgccccagcggtgctgccacgatcgtgtggtggttgccgctggggcactatttctgtatatgcggtgtggctatgattcgttgctgtcgatggtgtcttcgagcatctgatacaggtggaggcaggtagagatagtttcgctggcctggtctagaacgttccggccgataacatttttgtggttgtcgcggtggcggatgatagcccacatgatctcgtcggctgccgcctgtagtagtttggcttggtatgcgattccggcgagccagtctagtgcttcctggcttgcatagggggtctggttctcgctgttgccgcgggtgttgctgttgtttgtggggtgtcctgcactgtcgcataaccacaggatttcgctgcactcgtctagcgtgtcctggtcgatagcgagatcgtcgaggctgacttcgttgacggtaaggttcacgttgtcgagtgagatgggtacatggtactggttttcgacactgtcaacaatgttttctagctggttcatgttggtgggctgttgttggacgatgcggtgtatcgctgtgttgagggtggtgtaggtgatgttgtgtgtgttattcatcgtgttatgccattccttcgttatcgtctggcatgtagtatgtgctgtttgcgtagcctgttagggtgatcagtgtttggtctgcccactgtttcacggtttgtcttgtcactccgagtcgttgggcggccgacgcatatgtttggtcatatccatagacttcccggaatgcggctagtcgggcgaagtgttttcgctgtttggatggctggcaggtgagggtgtagtcgtcgatggctagctgtagatcgatcatggtggcaatgttgttgccgtggtgttgtggcgcggttggtgggggtggcatgcctggctccacactgggtttccatgggcctccgttccagatccattgggcggcttggataatgtcggcggtggtgtaggttcggttcatgtgtcatcccctgaataggttgtcgaggttgtctgggttgctggtgtcgaatcgtccgacgcagtggcagtagtcgtacatgagtttgataatgtgttggtggtcgccgaggtaggtgtttccgctgatgctgtaggtggctgtgccgtctttgctgatggtgtatttggcggtgatggtttcgggtgtttcggtgttggtgatgatggcggtggtggtggcgcctacggtttgtagcctggtggtttgggttccgtcgtcgaggatggttgtgaccatggtgtgtgttctcccttttaaatgctggtttggttgtcggctatggctgtgatttcttgtaccggtttgggtaggtctaggtgttgtatggttttgtttgctagtcgttgggctacacggtagcacatttgagtccactggttgccttgtagctggtggtattgttcccgcaccgcaatatatagtagagagtcttggtacaggtcgtctgggttgacagccgggtagcggcgggcaatattggtgcaggctttgtgtagctggtgttggtggtggggggttgcccactcccacgatgctgtggttgcttgttctactttggttggtcgtctgctcatggcactatttcatctcgctatctggtagttgtttggtgttttgttgttgatagtgtagcacacgagtccggggtggccggtggtgcctgtgcggtgccggtaccagacggattctccttccgtggatgggcattggatgaaggtgcgttgtccttgctcggagatttctaggtggtgtcggtgcccggccatgaggatgtgggatgtggttccgttgtggaattcttggccgcgccaccattcgtagtgtttgccggtgcgccattggtgtccgtgggcgtgcagtatttgtgtgccggctacgtttacggtggtggtcatttcgtcccgttgggggaaataaaagtgtaggttggggtagttgttgttgagctggtaggcttctgcgatggcgcggcagcagtctacgtcgaaggagtcgtcgtaggtggtgactcctttgccgaatcgtacggcttcaccgtggttgccggggatggaggttacggtgacgttggcgcagtggtcgaacatgtggacgagttgcatcatggccatgcgggtgagcctgatttgttccgtcaagggtgtttgtgtgcgccaggcgttgttgccgccttgtgacacgtatccttcgatcatgtcgccgaggaaggcgatgtggactcgttcgggtttgcctgcctgttgccagtagtgttttgcgactatgagggagtgcaaatagtcgtcggcgaagtgtgctgtttctccgccggggatgcctttgccgatttggaagtctcccgccccgataacgaaggccgcagtgctgtagtcggtgtgagagttgtcggctggttttggtggctgccattcggctagcttatcaacgagttcgtctacagggtaggggtttgttgcgggttggtggtcgatgattttttgtacggatcggcctgtttctccgttggggagtgtccattcggagatgcgtgtgcgccgtacggtgccgttggcgagatcgtcatggatggtgtctgcttcttcattatgctgggctagctgtgtgaggagccggtcgatattgtctatcactggttttcctcctcctgtttcttgggtgtgttggcttgtttgcggcgatagtctttggtgacggtggcggagatggggtatccggcttgggtgagctgttttgctagccacgaggcggggatggttttgtctgcgagcacgtcggctgctttagccccgtagcgttgaataagggtttcagtttttgttgccatgatatcctaggggttgtgtggtgggctgccatcctgtgcggcagtcgccgtcgtgtcctggtttgcgggtgcaccatgtgatggtgccgtctgtgtggttgagtgttttgccgcacatgacgtcacgcaagtgctcgggcagtacactgtcatcctggttgctggtttgtgtgtcgaagagtgttttctggttggtgaaatgttcggatacggtgccgttgtgtacgggtagtatccatgttttccattgttgttgtagccgtgtgttccagtggaattgtttggcggcgttcgtggcttgtttgatggttttgaagtagcctacaatgatccgttgatggtcgctatcgggcttgtgtggccccttccaatattgggcagctacagcgtacctgttgttgtctgtgaagcgcccccagcagtattccaccatgtgtgatagtaccttgtcgggcatgtctcgtacttggttttcgtcgagccacgcgtcgacaatgatgttgcgtatggcttgcttgtctttggtggtgggtttgaatgcgatgctcacagtacgggcctgtcgtcttgcatgaactggttgaaggtgttgttcccggcatgttgggcttgtgtgatttgctggtcggtccagtctggatgttgctgtttcagataataccagtggcacgcattgtaggtttcgtcttgtagccgggtgagatggttttcggtgatgatttgtttccacatggcccatgacacgtcgagccggttgaggatttcgagggctgggatgttgaactggtcgaggaacaggatttcgtgggtgtagtagtttttctcgtaggcgtcccatccgcttcggtgcctgtttggctggtttttggggtaggcttcccggcagattttgtgtaaccgtttggccatgtctttgggtagcctgatgtcgggattggcgcggatcatggatcgcatcccgtcgtaggtggtgccccaggtgtgcatgatgtggagtgggtcttccccatcggcccatttttctgcacagatggcgaggcggatgcgcctcctggcggctttactcgtgtcgctgcggtgggggatggggcatgtatccagggggtccatgatgcttttttatacctttcttgaggtgatgtttgtttgctttgtgtggttttattgtagcactgtgttgagggcttgtgtcaaccctgtttttccggcctgcaggtaggtgtctgtgacatcccccagggtgaggggcacatgggtggcttgggggagtgctgcctggagggtttgggccatctggtggcccgccttgtctgggtcggaccatatgtagatgtggtcgtagccttcaaaaaatttggtccaaaaagtttgccacgaggttgcgccgggtagggctacggccgaccatccgcattgttcgaggatcatggagtcgaattcgccttcacaaatgtgcttttcggctgccgggttggctatggcggccatgttgtagatggagcctgtgtctccggcgggggttaagtatttggggtggttgtgggttttgcagtcgtgtgggagtgagcagcggaaacgcatttttcgtatttcggctggcccttcccaaacggggtacatgtaggggatggtgatgcactggttgtagtcttcgtggccggggatggggtcattgtcgatgtatccaaggtggtggtagcgggctgtttcttcgctgatgcctcttgctgagaggaggtcgagtatgttttcgaggtgggtttcgtagcgggctgaggctttctggattcggcggcgttccgcaatgttgtatgggcgtatgctgtcgtacattcgggttttctttctctagttgttgtttcagtttgttgagtccacctccgatgccgcatgtgtggcagtaccagacgcccttgtcgaggttgatgctcatggagggctggtggtcgtcgtggaacgggcagaggatgtgttgctcgttcctggatgggctgtagcgtatccggtaggtgttgaggaggcggcgggtgtcagaggtgtgggaggagctcgttgagggttgataccacataggcttcgctccagggtttgttgcgttgtttcatgacgacgagtccgatggtggattggttttgtttgtttcggtgggtttcgtagttgcgtgcctcaagggttgcttctttgacgaattgggcgagatgctgctggccggctttcgcttcgatcacgtatgtgtggtttttggttttgaggatgaggtcgccttcgtcttcgcggccgttgaggtggaggcgttctatgtcgtgtccggtgtcgcgtagctggtgcaataatcgtgtttcccattctgcgcctgccctgcggttgcgtgcctgctgtgaagccatcatagtcctttgtgtgttgtggtcatgttccatggctgtttttcgacgaggggtccgaagaatgtgtattcggggtaggctcgtagccgctcgtatcgggtgccgtcggggctggatttaccggtgcgctgtttgagcacggcgatgcgagcctctgccgggatcgatagcccgttgccattatcctcgccaccatataatgagactccgaggatgagttgtggtttttcggagaggccgtttttgatttctcgccgtgctggcgggtgttcgatgtcggttccggttttgtcggttgcgtggtgtgtgacaataatggtggagccagtatccctgcctaatgctgtgatccattgcatggcttcttgctgggcctggtagtcactttcgcagtcttggatgtccatcaggttgtcgatgacgatgatgggtgggaaggtgttccacatttccatgtaggcttgtagctccatggtgatgtctgtccatgtgatgggtgactggaatgagaatgtgatgtgttggccgtggtggatgctgtctcgatagtattctggcccgtagttgtcgatgttgtgttgtatttgtgtggtggtgtgttgggtgttgagtgagatgattcgtgtggaggcctcccagggtgtcatgtcccctgatatgtagagggcgggctggttgagcatggcggtgatgaacatggctagcccggatttttggctgccggaccgccccgcgatcatgactaggtcccctttgtgaatgtgcatgtcctggttgcggtagaggggttctagttgtggtatgcggggcagttcggcgcctgtttgggaggctctctcgaaggatcgttgtagagagagcatcggagccttaatctatctgtctatcggttggatgatgttttggtggtcagatggagtcgatgtcgatatcagcatctgtaggggctgtggtgtcgtctagctggccgttatcgcgcttgtctacgtattcggcaaccttttcgtagatggcgtcgtctaatggtttgagcacgaccgcgttgaacccgtttttggtgcgtacggtggcgagtttgaaggcctgttcttctccaaggtaggcttcgaggtcgcggatcatggagtgtgggcggtcgttgttgccgcgggctttctcaataatagcgttggggatggtttctggggtgccgttgttgagatcctggagggtgtggaagatggtgacatcggcgtagatgcggtcggcaacctgtccaccgtagccttcggtgttgtgctggacgtcgcggattttgaaggcgatggcggtggcgtcctggtttcgggaggggttgaagaaggtgctgttgctgttgttgcggtagttggcgagtcccattgttgtttcctttactgtttggttggtttgcgtcggttttatcgggtgaggctgtttcgtttggtgcggaaagcctcggatacgtcactgttactggtgatgatcttcttgtactgtttcagaaggtctgctagctgtgccttgcttgttgcattgttgattttatcgatgatggtgttgtttccttctgatgcgatgttgtctacatagtctttggcggcctggttgtatcggtcttggaggatgatggatgctgtggcgatcagtgttgccaggtcccagttccttgccgcggagctggttttgagtccgcctagcaggtcgatgatagtcttctttacctggttggcggtgtctccgcggatgacggtccatggggcggcgtagtctcctccgtatttgagggtgacggtgaatcggtcgtcgtctgtgttgtcggtcactggtgctccttgtcttcttttgttggggctgtgatggtggtttctatagggtacctgtaggcgtctttcccgttgacagcccagcaggcgtccttgacggggcatcctttgcagagtgctgtgacgtggggtacgaagatgccttggctgattcctttcattgcttgactgtacatggatgatacatgccggtaggtgttgttgtcaaggtcatagagctcggtggatgtgccttgtgtcggggacttgtcgtcgttgcggctggtggctggcgtccaaaacatgcctttcgtcacatggatgccgtgctggttgagcatgtaccggtatgtgtgcagctgcatactgtcggcgggtaggcgtccggttttgaggtccaaaatgaaggtttcacccgtatttgtatctgtgaatacccggtcgatgtagccaacaatctgggtgccgtcttggagggtggtttctaccgggtattcgatgcctggctggccgtcaataacagcggtagcgtattctgggtggttgcgcctccatgttttccaccggtccacaaaggtggggccgtaaaccatccaccaattgtagtctttcttgtgtggcccgcccgactcgcacatgtttttgcatattctgccggagggtttgatttctgtgccttcggattcggtgagggcgacttgtgtgtcgaaaatgtttttaaaagatgagagtttgtctggcagtgcagggtattcggcgggattgtacaggtgtaggccgtattgttcggtgatgtggtgtatggcgcttccggcgatggtggcgtaccaggtgtggtgctgtacatggtacccgtgggataggcgccatttttcaccgcattcagcccactatgacagtgatgagtaggagatgtgtcctgggtggtggatggttttcgggtattgtgctaggggcattacttgtcgcctttgtgggtgttccaggggttgcgggtgtcttggccggcatcgtgttgctggtaggcgaggagtgctaggcagtgccaggcagcatgggccaggtggggtagcccggattcatcatcgaggttgcgtccttgctgccaggatagtagatgccgatagagggcgtcgacactgtggctccacggatagccgccggtccagttgttgtcgccgtatttggt

SEQ ID NO: 37 - DNA, 5405 bp, Pahexavirus sp.
  source 1..5405: mol_type = genomic DNA
cctcggcacgaaccataacctcattatggcccttcaggtcacggccagtctgatccgggtcaccatactcgataagctcgatcgggaaattacgctggaaaccccaatgaacacgagagaaatcaccaacaatagccttaacacccgaggcaggcgacatctccggggcgccagaaacagtcgaagaagcaccaacattcagcccacgccaattatccaaacctgcaaacccggcggcaggatacataggctgaccggcaagcggagaccccttcggatacacctcagtagacagagcaaacgagaacgccggatccaaagcaacaccgttaggaacctgcaaaccagccccagcgataaggccgacagccttgaccagatcagccgtagcggaatcggtggcatcaaccgtcttcttcgtcttatccagcgacaccttgacagccgcggcaggcttcccagtggcaggatcaataccatggaaagcaatcagatccacggcgcgaccaatcgaagcaccaagagccggggaaatcagatcctgcaaaacacccagacggtaatcagcatcagcccacataaactcgtccgagacacgctgctgagtcacaaccttgataggctgtgcagtaaacgccgaaacatcaacagacgcggaaggcttaacctcgccctcaccaacaatcttagcgcgaggaacaccactaaacacggcacccttaacagggccaaaaatagtcggctgctccggcgaaagcttcgccaaaacaccagaatcgatagcacggtcacgaaccgcaccaatcatagaaccaggaagctcaagcttccctgcagaaagaaaatcgtcagccatgataaatcatctcctagaattattgacaagagcatccacaaacgcgacaccctcacgtcgtttaacatcatcaacgggggcactccccgcaagacggcgcacacccgcgccaccactactatggtcgatcaaacccttcaaagctttcgcagactcggcaagcgactccttatcgccacccgacaagaaagcgatcgcatcactggacaaaccatactctgaagccacctcgcgcttcacaccctcaagaacaaacccgttgatcctgtcttcgagttcctcattcttgcggcgaagatcatcaatcacagaccccgcatcaccatccgaggcgcgaagcttctccaactcggcgaaattacttttagcacgagactcccacttacgggcctcagccttccaatccgtgccagacggcccagaagcctcacccgtcacggaaacatcaccggcatgatcatcgccggcagcctgcccatccttcacaacatcaacaatgtctccaccctttccgggctcaacagcatcattgtcaacattctgttcctcaacactctgatcggccatagcctaaccctacactccttgcggaaaacaacacaacattgttgacccccgtgcgggagacaaccctgtgcaccaataaccggtggcgcacaaccggaaaccacatcaaattatctcatgccaccaacagtacgcatagccttcaaaatatttccaggagactgctgcaacccgtgatcatcaacccactcacgggccttctcatacgtcctctgatactcggcatcagccctatttggttcccaggggccaacaacctcaaccaccgtacaaccacaatgatcatgatacttcgaaccaaacggacacttaccaccacgcttatgacgccgcgtatgtccagtagtaagtgccctttctttggtcgtataatccgacctcgtagccaacatggcacaaaaagcacacggatcaccatcagtcacccgacgccacgacctaccctgcgcaccagcagaccactcaaccgtgtcacggccagcattcatgacagctcgattaacacccgccgccatagcatcaatagtatcattcgccctatccgggtcactattcataatcttcatagtcgaaaacgacctagccaaagccgcagcagcatcaaactcgtcatacacgatcaaaccaggatccacaccattcaaccggcgaaaatccgacacaaacctggcagccaacgatgccgaaccatcatggccggcacgctccaactccacacacaaacgcacatactgcgtgtcactcatcttcccggcacgccacaaacggccaagctcggcataatacccagcgtatttcccggcaaaacgaatcgcctgccgctgatactcagtcgcagcaagcctcgcctcaacccccgaagccatcgcctatcatacctcgttagtttgacgcgatatagccccagccagtgccgccaacgggtcagacgactcagcacgatgacgcatcacagcctcaacctgcacatcatcaagccccaacatctccaacaccgtccgagaatccgccggcaaaataccggcaccaacaagcttcgtcacagcatccgccgtagcagcccgagtcggggttgaagcatcacgccaacgcaaaccaacatcaccaaaaaaataggcctcatcaacacgagaatccaacgccttagcagccaagaaaccaaccgacagccagccctgaccaaacgacgtttgacgccgctcagcacgcttcacaagccgagattcctcggcagccaaagcctcaccactaggtgggttagacgtgataaacccgaaatagcgttcaggaacagccgcctcacccgcagtcaactgcgccaacagtctcatctgatccgaatacggtgtaggactattgacaggaaacgaccccacattcggggtgtcaccgtcatcatccttatccacagcccacacagaagccatcgacaggacccagccaggctgcgaaaactcgtcagccgacacacccgtaacccaacgctgaggataggcatagaagtcacgattcacagactgaccaagcaaagtcctaaccgcttcatcagtgtaagccctgatcgagcgggtaatctccgaacggccatcaatcctagacgtcctgcgacgattcacaacaggcaccaacggaaccgcacccaacacattcggtatacgacccgtctcaacccactcacggctaccccgccgctccacctgaacaatcacatcaggaagcaacaactccgcctcaaccacctcaggatcacacgtctgctgcaccacaaggccagcatccagacgagacccgtcagccgaaaaccggccagtacaattctttggtgactgcggacgcaccaacaccgacccatcatcctgggggataacagccacaaacgacaaaccaaaaatcagcgcatccaaatgcacatcacacgaagccgtagcaagccgattcgcagcatacacaccatccaggccgtagccgtcaccattagtccagcccagccaatccagacgctcccccaaagcatccacagctataccaggccacgacaccaccgtctgcacacgctgcaactccggaggaatagccacccccaaatcacgcacccgattagaaccctcatagtagccctcaatacgacaacgccacgaagacaacctttggatacgatcgtacatgccctcaatcagagccaactcgtccacgttcataccacagacacccgcttcctaccagaccgttcacgccgcttcactttaactgttttcgcaccaagatacgccagcgacacagcctccaaaggaacctcagaaccatccttaaacgaggaaccccaaccccacgcagaccccttacgcttctgcacagccgacctcacagcaatatccaacatgtcacggcgagaatcagcacgaggatgactgatcacacccgacctgacaccctccagaaaggcttgacacgcctccacatacacgccagtatcagcaaccaccacgccacggcccggaatgccacgatccgtcaacgccttctgcaacaacaccgcaccagacccggcaaccataatccggtcagtatcaccccaacgaaccgccaaccagtcagccaaccggcccacaccatcaacaatcgtccccgacagcccatcaataacctcaacatgaaccccagaatcagtcctgccagcacccgccaaagcaacccgatcccccgagcgagaaaacgaaaccccaaaaaccttaccgcccacaagagcaacatcatcaacagcagactgcaaccacttatccgccggaaccacagacgtagccgactggccacgatcccaccagccaagccgctcccgagcaaacccggcagcagacatcgactcatgctcatcgctcacggtcccaaaattcaggcggcgacccaacgctggattagtatcccccgccaacttccgccactgccgcgacacatcctccggatcagactcgtcaggaatcgaaaactccgtccacgcaatccttttaccacccgaaaaagcctgaccacgaagacgcaacacaaccgaaccatccgccaacggcccaggcggcgtacccaaaaaaatctgctgcggatcacccgaaggagccgcagacaccgtaggaagcaaagcctccaactgctcatccgacaactcctgagcctcatcacacaccaaatcatcaaccgtaaacccgcgagccgaaccccgagaacgggccacaaactcgaccgaaccccaacccggacaaccacacttacgctcaaacgtggcacaatccggatgatgcaacacaatagcctcctgaccattcgtcgcccgaatcgacttcaccatacgatacaagtcaggaaactgccgctcattctcaaaaaacgaacgcaaccgcataaaccccttacgagccgacttcaactcatgagccgtatgcaaaatacggcgaccctgaatagtcgccttaaacaactccacaacctccaaaatagcattcttgccattctggcgaggcacaaacaccccacacacacccgaagcaagcctgccattactaccgacagccagccaatcatccaacacctgctgctgacaaggatcaggcgtcaacccgtaagccctaccaagctccccagcatcaccgccagcagacaccgaatacgccgcagccacacggttacgaggaacctgagaacccacaacctgagacatcaagcacccctacgcttcctataccggtcaatcatcgccaccgcagaacccccaccacggccaccagacaccacatcaaccgaatacctatccaacatgcccataaaagccttcacatgagcacgaagcgaagccaccaaatccgcccggccctcacgccacacacaatcatgaatcaccgccgcatcaaggagaaacagccactcctcatcagacacgtacgatgcacggctatcctcaccccacacacgccaccaacgacgcgtctccccacac

SEQ ID NO: 38 - DNA, 8691 bp, Pahexavirus sp.
  source 1..8691: mol_type = genomic DNA
acccaaaaaatcattaaaaatattgatccccccaccacccagatctacacccccgccagctacgactgccccacacccttcgacctgacacgcctcgaaaacctcccctgcgaccacatggatttcgggggcctcgccgaagcctaccggcagcgtgtggaagccgaactccacaagctacgccccaacaccttcatcgcatccgacggcaccgtgttcagccacgacgcgtggaagccactcaccagtggagaagccacgcaactctactggaatgtgagccgcatcaatgttggccacctactcaccttgtgcacccgataaaacccccagccatacaaggatcgctcacaatcgttgagcgcagccttgacacaggccaccgcccacaccatgattcatcatgtcagcaacgaacaacaccccggaaaggggacacaaaacatgaacaagaaaaccggctacaccatcgcaggcatcacagccgccatcatcgccgccgcctcattcatgccagccccagacgacaatccgccactcgcctcacaacccgcaccgcaagccaccacagccaacaccgaatggacccccaaaaccgtccaacagcgcaaagccgaaaagaaagcacggcaggcagccgcagaacagtcaccgcgagccgaacaagccaaaacccacaagcaagcccaagcaaggggggaagaaaccgccaccggactcaccatgatcaccgccgcacacacctgcaaccgcaaagccgaacagcaagccgccacgcagggcgtcaaatggaacggcaaccccgacatcgacctccaactccacaaaattattggtaaagacaccttctccatcgtctacggcgccaccgtccgccagccgggagcatccaaactacccgtcaccgtccactgcctcgtcaccggaacagaaagctcaccgcacgtcaccgacctcaacatcaacccgcaacagtaacccgccaaggagcatccccgctatgcctctcctcccccactatgctgtcaccaccggactcgccgacacggcacacattattcaccacaccggctgcacactacgcacagccaccgacatcgcatcccgcatcaacaccctcaacccagacattgatctcgaccacgaaatccaccaactgttatctatcgaaaccaacctgtacaacatttataaaaccatcaacaccattcttcaggagcaagcatgaacacacccaacaacaacatcgagctacacagctacgaaacgttcttcaccagcctcgccaggatccaaggcgccatcatcacatggatgtacgccaccggcaccagccacaaggcagccctcgccatcatcgccgcatgcgccctcaccaccctcctaggcgcctccacactcaccaacaatccccgagacactaaatgatcacaacacccatccttatcgctgaaaccctcgccatcatcattctcgccgtagcactcgcccacaacaaccagtaacccacccttaaggagcacacaccccatggatgagcccacccgcatgtacaccgaccccaacaccggtgccaaaaaagaactcaaactctgcaggctatccctcatcgaccccgaagccttgcacgccctaggcgaggttgcaggctacggtgccaccaaatacggcgacaacaactggaccggaggatacccgtggagccacagtgtcgacgccctctacaggcacctactatcatggcagcaaggcaacaacctcgaccacgaatcacatttgccgcatctggcacatgctgcctggcactgcctcgcactcctcgcataccagcaacacaatgccggccaagacacccgcaacccatggaacaaaagcgacaagtaatgcctctagcacaataccagaaaaccatcagccatccaggccacatctcctacagttcactcacccagtgggccgaatgtggagaaaaatggcgcctatcccacggctaccacgcccaacaccacacctggtacgccaccatcgccggaagcaccatacaccacatcaccgaacaatacgacctccacctgtacaatcccgcagaataccctgcactgccagacaaactctcatccttcaaaaacattttcgacacccaaatcgccctcgccgaatccgaaggcacagaaatcaaaccctccggcagaatatgcaaaaacatgtgcgagtcgggcgggccacacaaaaaagactacaattggtggatgatatacggccccacctttgtggaccggtggaaaaactggaggcgcaaccacccagaatacgtcaccgctgttattgacggccagccaggcatcgaatacccggtagaaaccaccctcgacgacggcacccagatcgttggctacatcgaccgtatcttcaccaacactgacaccggcgaaaccttcatcctcgacctcaaaaccggacgcctacccgccgacagtatgcagctgcacacataccggtacatgctcaaccaacacggcaacgatgtgacaaaaggcatgttttggacaccagccaccagccgcaacgacgacaagtccccgacacaaggcacatctaccgaactctatgaccttgacaacaacacctaccggcatgtatcatccatgtacagtcaagcaatgaaaggaatcagccaaggcatcttcgtcccacacgtcacaacactctgcaaaggatgccccgtacaagacgcctgctgggccgtcaacggcaaaaattcgtacagatacccggtagaatccaccgtacagccaccagaaacagacaataaagaaaaggacaccaaatgaccgataaagacaagatcgacaatgatcgactcacgatcacactcaaatatggtggagactatgctgcaccatgggcggtcatccgaggagacacagcagagcagacaaaacaagcaatcatcgatttattgggcggactcaaaaacgatgacgtgtccaaagactgggatctagcaacactcgtagcgagcgcatccatcatcctccaagaccgatacaaccaggcagccaaagactacgtaaacaacatcgcatccaaagaaaacaccatcgtcatcaacaaaatcaacaatgcaaccagcaagacacagctagccgaccttctcaaacagtacaaaaagaccatcactagtaaccctgacgtgtctgaggcgttccgcagcaaacgaaacagcctcacccgataaaaaccgacacaaaccaacaaagcagtaaaggaaataacagttatgggactcgccaactaccgaaacaacaacagcaacagcaccttcttcaacccctcccgaaaccaggacgccaccgccatcgccttcaaagtacacgacgtagaacacaacaccgaaggctacggcggacaggtcgccgatcgcatctacgctgatgttacaatcttccacaccctcgaggatctcaacaacggcaccccagaaaccatccccaacgccattattgagaaagcccgcggcaacaacgaccgcccacactccatgatccgcgatctagaagcataccttggcgaggagcaggccttcaaactcgccaccgtacgcaccaaaaacgggttcaacgcggtcgtgctcaaaccccttgatgacgccatctacgataaggttgccgcatatgttgacaagcgagacagccagcccaacaccacgggcagtgatgatgtggatatcgactccatctgaccaccactctccgcccaaaccgtaacagatagataaggttccgatgctctctctacaacgatccttcgagagggcctcccaaacagccgccgaactgccccgcataccccaactagcacccttgtatgacaacctggacatgcacatccataaaggggacctggtcatgattgcggggcggtccggcagccaaaaatcagggctagccatgttcatcaccgccatgctcaaccagcccgccctctacatatcaggggacatggcaccctgggaggcctccacacgaatcatctcactcaacacccaacacaccacccaacagatacaacacaacatcgacaactacgggccagaatactatcgagacagcatccaccacggcgcgcacatcacattctcattccagtcacccatcacatggacagacatcaccatggaactgcaagcctacatggaaatgtggaacaccttcccacccattattgttatcgacaacctgatggacatccaagactgcgagagcgactatcaggcacagcaagaagccatgcaatggatcacagcattaggtagggataccggatccaccattattgtcacacaccacgcaaccgacaaaaccggctccgatattgaacaccccccggctaggcgggaaatcaaaaacggcctctccgaaaaaccacaactcatcctcggagtctcattgtatggtggcgaggataacggcaacggactcaccatccccgccgaggcacgcatcgccgtactcaaacagcgcaccggcaaatccagccccgacggcacccgatacgaacgactcagagcctaccccgaatacacattcttcgggcccctcgccgaaaaacagccctggaacatgaccacaacacacaaaggactctaaaaaactatggccacacagcaggcacgcaaccggcgggccggagccgaatgggaaacacgattattgcaccagctccgtcacatcggccacaatatcgaacgcctccacctcaacggtaaagaggacgaaggcgacctcatccttcaaaccggaaacaaaacctacgttatcgaagcgaaagccgggcagccccatctcgccgaattcgtgagacaagccagccaagaggcacgaaactacgaaacacaccgaaaccggcagccacaatccaccatcggactagtagtgatgaaacagcgcaacaagccatggagggaagcctatgtggtatcaaccctcaacgagctcctcccacacctctgacacctgccgcctcctcgacacctaccggatacggtacaactcatccaagaacgagcaacacatcctctgcccgttccacgacgaccaccagccctccatgagcatcaacctcgacaagggcgtctggtactgccacacatgcggtgtcggaggcggacttgccaagctacaacaacgattagaagaagaaaacccgaatgtacgacagtatacgcccatacaacattgcggaacgccgccgaatccagaaagcctcggccctctacgaaacccacctcgaaaacatactcgacctgctctcagcaagaggcatcagcgaagaaacagcccgctaccaccaccttggatacatcgacaatgaccccatcccaggccacgaaaactacaaccagtgcatcaccatcccctacacgtaccccgtctgggaagggccagccgaaatacgaaaaatgcgtttccgctgctcactcccacacgactgcaaaacccacaaccaccccaaatacttaaccccggcaggagacacaggctccatctacaacatggccgccatggccaacccggcatccgaaatgcacatttgcgaaggcgaattcgactccatgatcctcgaacaatgcggatggtcggccgtcgccctacccggcgcaacttcgtggcaaactttttggaccaaattttttgaaggctacgaccacatctacatctggtccgacccagacccggcaggagacaagatggcccaaaccctccaggcagcactcccccaagccacccatgtgcccctcaccctgggggatgttacagacacctacctgcaggccggaaaaacagggttgacacaagcactagacactgtgctacagtaaaacacgttaacaacacgaaaccagaaaggtacactaaaacatcatggatcccctcgacacgtgcccaatccccaatcggcgcaacactagccaagcagccaggaggcgtatccgcctcgccatctgtgcagaaaaatgggcagacggtgaagacccactgcatatcatgcacacctggggcaccacctatgatgggatgcgatccatgatccgcgccaaccccgacattaaactacccgacgacatggccaagcgtttgcacaaagtatgccgggaagcctaccccaaaaaccagcccaacaggcaccgaagcggatgggacgcctacgagaaaaactactacacccacgaaatactcttcctcaactccttcaacgtgccagccatcgacatgctcagacgactcgacatctcgtggacaatgtggaaacaaatcatcaccgaaaaccatctcacccggctacaagacgaaacctacaatgcgtgccactggtattatctgaaacagcaacatccagactggaccgaccagcaaatcacacaagcccaacatgccgggaacaacaccttcaaccagttcatgcaagacgacaggcccgtactgtgagcatcgcattcaaacccaccaccaaagacaagcaagccatacgcaacatcattgtcgacgcgtggctcgacgaaaaccaagtacgagacatgcccgacaaggtactatcacacatggtggaatactgctgggagcgcttcaccgacaacaacaggtacgccgtggcggcacaatactggcgaggccaaaacccacccgacagtgaacaccatcgcatactagtcggctactacaaaaccgccaaacaagccgaaaacgcggccaaacaattccactggaacacccggatacaacaacaatggaaaacatggatactcccagtccacaacggcaccgtatcagagcatttcaccaaccagaaaacactcttcgacacacaaaccagcaaccagggtgacgccgcactgccggagcatctacaaaacgtcctgtgcggcaaaacactcaaccacacagacggaaccgtatcgtggtgcacacgcaaaccaggacacgacggcgactgccgcacaggatggcagcccaccacacaacccctaggacatcatggcaaccaaaactgaaaccctcatccaacgctacggtgataaggctgccgacgtactcgccgacatgtccatacccgccacacagctagcccaaatgctcactgaagccggataccctatctccgccaccgttatcaaagactatcgccgcaaacaagccaacaccaccccacaaacagaagaggaaaaccagtgatagacaacatagaccggctactcacacaactagccaaccacgacaacgccatcgacaccatctgcgacaatctagccaacggcaccgtacgccgcacacgcatctctgaatggaccttacccaacggagaaaccggccgatccatacaaaaaatcatcgaccaccaacccgcaaccaacccctaccctgtagacgaactcgtcgataaactagccgaatggacacccccaaaaccagccgacaacacccacaccgactacagcactgcggccttcgtcatcggggcaggagacttccaaatcggcaaaggcatccccggaggagaaacatcacacttcgccgacgactatctacactccctcatagtcgcaaaacactactggcaacaggcaggcaaaccgcaacgagtccacatcgcattcctcggcgacatgatcgaaggatacgtgtcacaaggaggcaacaacgcctggcgcacacaaacccccctgaccgaacaaatcaggctcacccgcatggccatgatgcaactcatccaccaattcgaccactgcgccaacgtcaccatcacatccatccccggcaaccacggagaagccgtacgcttcggcaaaggagtcaccacctacgacgactccttcgacgtggactgctgccgcgccatcgccgaagcctaccagctcaacaacaactaccccaacctacacttccacttccccagccgagacgaaatgaccaccaccgtcgacgtggcaggcacacaaatcctgcacgcccacggccaccaatggcgcaccggcaaacactatgattggtggcgcggccaagaattccacaacggcaccacatctaatattctcatggccgggcaccggcatcacctagaaatctccgaacaaggacaacgcaccttcatccaatgcccctccatggaaggcgaatccacatggtaccggcacaagactggcaccaccggaaaccccggactcgtgtgctacactatcaacaacaaaacaccaaacaactaccagatagccagatgaaagagatgccatgagcagacgaccaacaaaagcagacctagccaccaccgcatcgtgggtgtgggccacagaccatcatctacgcacactcaaccgggcatgcaccaaaacagccgcacactaccccgcaatcagcgcagacgacctctaccaagactccctactatatattgcggtgcgggaacaataccacaacctagacaacaaacactacaccaaaatgtgctacagggtagccaaacggctagccaacaaaaccatacaacacctagaccagccgaaacctttaaccgacattattcatctagccgacaaccaaacaagcatctgaaaggggagaacacacatcatggtcacaaccatcctcgacgacggcacccaaaccaccaggctacaaacagtaggcgccaccaccc

SEQ ID NO: 39 - DNA, 9195 bp, Pahexavirus sp.
  source 1..9195: mol_type = genomic DNA
ggcttcacagaatccgtcaccgacttgatcaccggattcaacgcaacaaaaatctgccgcaaaccgttcaaaaccggggccatagccgtagcaccaagatagcccagggcgctcttcacattcttcatagcgccctcaaacgtcttaccagacgcctgcgcagcgccacccatgccaagcttcatcgcagccgcaaacgtgttaaaatcaatctgccccttcgacaccatctgcgacacctcagcagacgttttaccagtctgcctagcaagcaaagacagcacaggaacacccgccatcgtaagctgcaacatgtcatcgccctgcaacttaccgcgagccatcacagacgtaaaaatagcgcccgtatcctgaaacgacttaccagaaatataagacacatcggcgacagtcttcaacacatccgtcatctgcccgccagactgcacacccgaagcagacaacgccgcagccgtagacgccgcatcacccaacgcatacgacgtaccagtcacagcctcaatagccgaattcataatcgaagacgtgtcagacgacgtatgacccaaaccagtcagtttagcctgagcctcatcaatagccatcgccctagcaataccgccaccaatagtcacatcatagatagacttggggcccttcttagcaacattgatggcacccaccatggcggcaccacccaaagccaacttcatgcccttagcaaacaagctacccgaacgctgaccctcagccggcatcacacccgacaactgtttaccaacatcacttttaaggccaggcatcttcgtatacaacgacacatatgcggaagcaatctcaccagacatatactattcaccccataatattaatctcgcgagacaccccgccaccggcacgaacacgcgccaaaatatcgtccacctgcccagacgtaaaccgggccctacgctcatccgtaggcctcgccacaggctccggctgcccctcactattagcagacccgtaatgatccagcatgtccaacacagcccactcgcaccactcaaacggtcgctgccaaccattaaggtgggccgccaactggctagacgtatcggtacacaacacgccagccagccggacagcctcaccccaacacatctgcgggccaccaacactataaacagaaacaccaaacttggtgcggaaatcgtattcgatggccccacgataatcatcaatcaggccgtggagccaaactattcccccagcgaggcacccttaccgtcaggcttatattccatccactcaaggaaaatctcggcaacacgaaccataggaagcccctccagggcctccacagcatcctctggggcggcagcctccaacatagaaaacatcacctcaacctgggcgaaatcagcagactccccagactgggcaatcctggcggcacggcgaaaaacacgggcaggaacagcctgcgctgtttcctccgcatccgccaacacccagctacggtcaccaatcttcaacgtgtaaccagtgtcactcatctatcaacaatcccctaaaatcgtgtatcagttatcggacggcggattaggatccggcttcggcgaaggaggaggcgtcggaggagtatcagcttttaaagccgtcatccacccccgaccagaaaccgcatcgcccttcttattaatctgggcaggatacgccttcaacgtcacaccatacccatacacctcgccattcttgcccttaatctcgtcacgatcaatcaactcaacctcagggaaatagtagcgaataacctgatcgccatcaataatatccatcaacagggcgtgcacgccagtggtggcaccaggagaaatatcgaacgaacccgaatcggctccggcagtaaccttcgactgccaaaacagttcgataacctccttcttagactcgatcagctggaaagaaatctcgatagaagactccgtagccacagtgcgaacaacatccgcattctgccaagccttcaaatcatccgttttacgctcaggcttaatcttaaacccgtcatccgacagataccctaaagcggtaagaccgtcaggaaccgtcttcacaccatcaatagtgtcaccggcatgagctttaccaatatagacgtcacccgtaacagcagagcgaacattagacgctttacgtgttgcagccatcataacccccaaaaatatcaaacaattacattaaaacaaaaacaataagcttattcagactccgcaggcctacatataagctcaaaaagcgaatacacatcaaaacgtgcaccatccaccaaaagatcagggccagtagaccgtttacagtacaccacagggtcaccgtccacaccatccgccagcacagcctcaacacgacgcgccaacgacatagcacgatccggcatatcagaaaacacattcacccgcaaaaaaacacgctcacgaacatgcaactgcgggccaccatcaagagccaaccaaatcagatcaccgccgaaatcgtcaggcaccgtcccagtacacggtgtatcggacagccatccatcatccttgagcacacgtttagcccacacgcgaggatcaccgtaaacgatcacgacgcagccccaatcgaccgggccaacgtgccatgcttcgcctcaatacgcttcccaccctcatatgtggtgcctatacgagcgacagcctcgacacggtgaacctgcacctccgacgacaaaccattacggtattgggccttatcgaaagcgttaccgcccacattcgccgaggctgcacgcttgaccctttcgccacgctcagccaacatagactgcaccccagaagacttcaacacctcacgaatacccggcaagttaagcttcacattcacatcctgagccactacccatcagcccttcttacgcttcacattaacctgcgtaccagcatcccaaccggacatgggatgatgccacgcgataggagacccgtcagcctcccacaccacaccccgaatacgccaccggcaacgataatcagcgcccacaacaggggacttgaacagcatcgaccaatgctcataatccgagtcacgccccgcggcctcatcctcctgcgacaacgaagcatagatggccacgttatggtacacagtctcgacaggcttagaccagtcttccaccttgtcaccaagatcatcgacacgaacagtcggctgaagcatcacaaccgtttcaccgtaaggaaaactggtcatatcatatctcccacaaagggccagcgtagccgttaatatcagatccgcacgagcaaccctcaccccacaccgtggaacacacctcagaatgcacatatcgaccattaatagtgggtgtgatagtgaacgctttaccagccccaccatcaccctcacacagcttcttcaacgcggcaatctcagaaggccacaacaaattcgtgggagtattagaccgtgtagtctgagcgaaaggacccgcagactcatactgcacctgacccgacacggcagtatcattccagcgcaacaaagccctgcgcagaatagccttagcggcatccttgtatttgaaatccggtttagcgatacagggggcgacactgacagccacagcctccacatcggcgatcatcgcctcaagcttctctctaggaatatcggcgaaaggctcaatatcctcaggcttcaaaatgatacccatcaacaccaccccctgcacatagtacacatccgcttatcttgtatcagttaccagccggaggattaggctcaggcttcggggccggaggaggagtcggtgcagccttctccttcacaacagcaaacgaatcaagcgactcgatagccacatacaggacagcctcggcacgaaccataacctcattatgtcccttaaggtcacgcccagtctgatccggatcgccatactcgatcagctcgatcgggaagttacgctggaacccccaatgaacacgagagaaatcaccaacaatagccttaacaccagaggcaggcgacatctccggggcacccgaaacagtcgaagaagcaccaacattcagcccacgccaattatccaaaccagcaaacccggcggcaggatacataggctgaccggcaagcggagaccccttcggatacacctcagtagacagaacaaacgagaacgccggatccagggcgtccccgctaggaacctgcaaaccggcacccgcaatcaagccgacagccttaacaagatcagtcgtagcggaatcggtggcatcaaccgtcttcttcgtcttatccagcgacaccttgacagccgcagcaggcttacccgtagccggatcaataccgtggaaagcaatcagatccacggcgcgaccaatagaagcacccagagcaggcgaaatcagatcctgaagcacacccagacggtaatcggcgtcagcccacataaactcgtccgagacacgctgctgagtcacaaccttgataggctgcgcagtaaacgccgaaacatcaaccgaagcggaaggcttaacctcgccctcaccaacaatcttagcgcgaggaacaccactaaacccggcacccttcacagggccaaaaatagtcggctgctccggcgaaagcttcgccaaaacaccagaatcgatagcacggtcacgaaccgcaccaatcatagaaccaggaagctcaagcttccctgcagaaagaaaatcgtcagccatcacaaatcatctcctagaattattgacaagagcatccacaaacgcgacaccctcacgtcgtttaacatcatcaacgggggcactccccgcaagacggcgcacacccgcgccaccaccactatggtcgatcaaacccttcaaagccttagcagactcggcaagcgactctttatcgccacccgacaagaaagcgatcgcatcactggacaggccacactctgaagccacctcgcgcttcacaccctcaagaacaaacccgttaatccggtcttcgagttcctcattcttgcggcgaagatcatcaatcacagaccccgcatcaccatccgaggcgcgaagcttctccaactcggcgaaattacttttagcacgagactcccacttacgagcctcagccttccaatccgtgccagacggcttatctacaccatcatgcttcgactgatcgcctgcctgcccgctttgatcatccttcacaacatcaacaatgtctccaccctttccgggctcaacaacgtcattgtcgacattctgttcctcaacactctgatcggccatagcctaaccttacactccttgcggaaaacaacacaatattgttgacccccgtgcgggagacaaccctgtgcaccgataaccggcgacgcacaaccggaaaccacatcaaattatcgcatatcgccaacagtacgcatagccttcaaaatattgccaggcgactgctgcaacccgtgatcatcaacccattcacgagccttctcataaacccgctgatatgcggtgtccgcagagctgggctcccaacgcccaacaacctcaaccaccgtacaaccacaatgatcatgatacttcgaaccaaacgggcgcttaccaccacgcttatgacgccgagtatgaccagtagtaagtgccctttctttggtcgtataatccgacctcgtagccaacatggcacaaaacgcgcacggatcaccatcagtcaccctgcgccacgacctaccctgcgcacccgcagaccactcaaccgtgtcacggccagcattcatgacagcccgattaacacccgcagccatcgcatcaatcgtatccttcaccctatccgggtcactattcatcatcttcatagtcgaaaacgacctagccaacgcggcggcagcatcaaactcgtcatacacgatcaaaccaggatcgacaccgttaagcttccgaaaatccgacacgaacttgcccgccatagctgcggaaccgtaatggccggcacgctccaactccacacacaaacgcacatactgcgcatctgtcatcttcccggaatgccacaaacgaccaagctcggcataatagcccgcatacttcccggcaaaacgaatcgcctcacgctgatacccggcagcagccatccgcgacgcaacacccgaagccatcacctatcaaacctcgttcgtctgccgcgatatagccccagccagcgcagccaacggatccgaagactcggcacgatgacgcatcacagcctcaacctgcacatcatccaaacccaacatctccaacaccgtccgagaatccgccggaagaataccggcaccaacaagcttcgtcacagcatcagccgtagccgcccgagtcggggttgaagcatcacgccacctcaaacccacatcaccgaaaaacgcggcctcatcaacactcgaatcaagcgccttagcagccaggaaaccaaccgacagccagccctgaccaaacgacgtttgacgccgctcagcacgcttcacaagccgagattcctcggcagccaaagcctccccactaggtgggttagacgtgataaacccgaaatagcgttccggaacagccgcctcacccgcagtcaactacgccaacagtctcatctgatccgaatacggtgtaggactattgacaggaaacgaccccacattcggagtgtcaccgtcatcatccttatccacagcccgcacagaagccatcgacaggacccagccaggctgcgaaaactcatccgcgctcacacccgtaacccaacgctgaggatacgcataaaaatcacgattcacagactgccccaacagtgtgcgaacagcctcatccgtgtaagccctaatagacctcgtaatctccgaacggccatcaatcctagaagtacggcgacgattcacaacaggcaccaacggaaccgccccaagcacattcggtatacggcccgtctcaacccattcacgagacccacgccgctccacctgaacaatcacatcaggaagcaacaactccgcctcaacaacctcaggatcacacgtctgctgcaccacaaggccagcatccaaacgagacccgtcagcagaaaaccggccagtacaattcttcggcgactgcggacgaaccaacaccgacccatccccctggggaatgatcgccacaaacgacaacccaaaaatcagtgcatcaaggtgaacgtcacacgccgccgtagcaagccgattcgcagcatacacaccatccagaccgtagccgtcaccattagtccagccaagccaatccagacgctcctccaaagcatccacagctataccaggccacgacaccaccgtctgcacacgctgcaactccggaggaatagcaacccccaaatcacgcacccggctagaaccctcatagtagccctcaatacgacaatgccacgaagacaacctttggatacgatcgtacatgccctcaatcagagccaactcatccgagttcataccacagacacccgcttcctaccactacgctcccgacggccacgacgaacacgtttcgcccccaaaaacgccaacgacacagcctccaaaggaacctcagaaccatccttaaacgaggaaccccaaccccacgcagagcctttctttttctgaaccgctgacctcacagcaatatccaacatatcgcgcctcgaatcggcacgaggatgactgatcacacccgacctgacaccctccaaaaacgcctgacacgcctccacatacacgccagtatcagcaactaccacgccacggcccggaacaccacgatccgtcaacgccttctgcaacaacaccgcaccagacccggcaaccataatccggtcagtatcaccccaacgaaccgccaaccagtcagccaaccggcccacaccatcaacaatcgttcccgacagcccatcaatagcctcaacatgaacaccagcatcagtccggccagcaccagccaacgcgacacgatccccagaacgagaaaacgagacaccaaacactttcccgccaaccagagccgcctcatccacagcagactgagaccacttatccgccggaacaacagacgcagcagactggccacgatcccaccagccaagccgctcccgagcaaaaccggcagcagacatcgactcatgctcatccgagactgtcccaaaattcaaacgacgccccaacgccggattcgtatcccccgccaacttccgccactggcgtgacacatcatccggatcagactcgtcaggaatcgaaaactccgtccacgcaaaccttttaccgccaccaagcgcctgcccacgcaaacgcaacacaaccgaaccatccgcctacggcccaggcggcgtacccaaaaaaatctgctgaggatcaccagacggggcagcagacaccgtaggaagcaacgcctccaactgctcatccgacaactcctgagcctcatcacacaccaaatcgtcaaccgtaaaaccgcgagcagaaccccggctacgggccacaaactcaaccgaaccccaacccggacagccacacttcttctcaaacgtggcacaatccggatgatgcaacacaatagcctcctgaccattcgtcgcacgaatcgacttcaccatacgatacaagtcaggaaactgccgctcattctcaaaaaacgacctcaaccgcataaacgccttacgagccgacttcaactcgtgagccgtatgcaaagtacggcgaccctgaatagtcgccttaaacaactccacaacctcaaggatcgcgttcttgccattctggcgaggcacaaacaccccacacacacccgaagcaagcctgccattaccacccacagcaagccaatcatccaacacctgctgctgccacggatcaggcgtcaacccatacgcacgacccaactccccagcatcaccgccagcagacaccgaatacgccgcagccacacgatgacgcggaacctgagaaccaacaacaccagacacctaatcaggcccccctacgcttcctataccggtcaatcatcgccaccgcagaacccccaccactgccaccagacgccacatcaaccgaataccgatccaacatgcccataaaagccttcacatgagcacgaagcgaagccaccatatccgcgcgaccctcacgccacaccacatcatgaatcaccgccgcatcaagga

SEQ ID NO: 40 - DNA, 10779 bp, Pahexavirus sp.
  source 1..10779: mol_type = genomic DNA
gaagaccgccaaggaccaacaccatgaacccggcgcacaggcccagaaaaaatctggccaccaccataatcaacaaccagccgtgcacccggcctcgtcaaaccgtcaagcctggaatgatcacccgacaccaccaactccagcgtcgacaaaccattccacttcaacgacaacttcaacgactcaaaaaaattgataggcgccacacggcgataatccggcgtaaacaatgttacatgcggaacaagaccagccatcaactattcaccaagccctcaaaaacctgtactgcaccgacacaacaatggcacccaaaccaaccatctcaatgttcacactcttagaaccgccaggcgggataggggcaaactcccactccttcaaacgatccatcacatcctcaaacccgttcaacaatgcagactgtttgcgaggatccgtatcaatagtgatccaatcatactcctcgacaggataatccgaagacacacgcaaaccatcaatctgcacagaccacgaatccaaaggcccctcaacacgaatcacaggccacgcaggcacatcacccttattagacaggttatcccaacccgaaccaacaccaggcgtcaacaccaccggaaacgctgtacccttcttattaacagggccgccacccaaccaatcctgcaacttcgcgttactgaaacgaaacctctgctcatccccataccaaaacgggtcataagccgtcaaatgcaacagataacgcgcataaccgcggttcaccggatccaccgtaaacgtgtcatcagccgaatcaaaccggcatttcagcacacgctcacggccggcaggggtcttcaccgacaactcccccacctcgcccgggggaaacgcagaccacaactcgtcatacgccttcatgaaaccgtcacgaaacccgccatccggatccgggtcaacacccgacaccaaaaccggcaacgtcacctcgcgaggcttcacattaaacccgcgccactccgagccgtgcaccccaacatgtgtttgagaaaaatgctcaacctcaggaacacccaaaccgcgcaacgaatcattcaacaacatgacaggagacgcacccgtataatccgtcaaatgaagcacacgctccggatcattaccaatcaacggcaacatagaccaagtaacagtcaaaccggcacgatcagacgggtcaggaataaacatgaaccacacccccaatcacacataagccaacgcgttcaaagcgtcacgctgctgccgctcaatccgcttcgcaaattcgttcggatccccatacgtcgggccgttcacattcaccacaacactcttatcattcatacgctgatacctgccatacggggtaaacgagcccacagacgaccgcacaccaaaccgggcatccaccgcatccggaagacggccagccacacccgacatcgcatccaacgccaaaccagcattaccggtgatcccctcagccaaaccggcaacaacctgacggccaacctgatcacgaaacacccgagacggggaatgaatacccaacacagacttcgccgcattcgcaacctgagaacccatattacgcaccgtatccaacaggccactcatagcgttccggataccattacctaaaccagacaccacatcacggccagcagacaccaacagggaccccatattgccaagcgcacgccgaatattgccaggcaaattccgaaaaaaacccagcacaccatgcacaccactagacacagccgaccccatagcatgcatagcagaagaagccgcactccgggcaccattaaacccgcgcacagcaccactacgaaccctagacgccatcgaaccgaaaaacccgccaacagcagacgccaccgaagacacaacactccggatagcattcatcgcataagaaacggcgccacgagccgcgttaaaaccagacctcacatgggcggcaaccgaagaaccaagccgggcaaaaaaccccacaaccgcgttcacaccacccgaaatgatcgacttgaaaccgttaataaacgctgacgtaaacgctctaatatgattccagccattcaagatggccgtgcccatagacctcacgccagacactaaatgattcacaacccatgagatgacacgggtgacagtcccaataatgcgggctgcagcagacacaatagcgccaagaatacgtgcaacaaacccgatcacagctgtcacaatcggcatcacaaccggaataatgcgggccaccacctgcaacacaaccgaaacaacctgcaccaccacacgcataatcgacatgatgaccggtatcagcgaccggataaggccgatgataggcggcagaacagacatgaccgcacccaaaatctgctgaatcacaggcatcaaaaccggcaccaactgcatgattacaccaacaacctgccgtatcacagcgacaacagcctgaagcaccggcatcaacgccggcaacaacattgcagcaacctgtgtcaccgcaccaataatctgcgtgatcacaggcgccagccgggcgacaagcatactaatcaaaggcacaatctgggcagccaaaccggcaaccaaaccaataatctggccgaacactggcgccaactgggccacaatccccgcaaccaaaccaaacaggggctgaatagcagccataatctggcccagggcttgaccaaccacaccaacaagctgcataacagcggcacgaaactgggcgttcgtagcaaacatggcagcaaacaagccgatcacaataccgacagggccacccagggcgcggaacacgccgccaagcccgccagcggcaccctccaaagcaccaaacgacggcagtagattctttaacgacaccgccaacggggcaaaccctgcaacaagcttcccgacaccggcagcaacaataccaaacactgcggtgccgcccgcaaacatggcacccaaattcactttggggacaggcaaatgcattctcgcaaaaatgcccttcaactgctccaccttggcgcgcatctgtgcattcattcttgtgatcatgcccggcatacggttaatccacgccaaaatagacggcatcatacgctgaataccagcatcgacggcagcaaacataggcttcacagaatccgtgatagacttaataaccggattcaacgcaacaaaaatctgcctcaggccgttaagaaacggcgccatagccgtagcacccaaataacccagggcactcttaacattcttcatagtgccctcaaacgtcttaccagacgcctgcgcagcaccacccatgccaagcttcatcgcagccgcaaacgtggcaaaatcaatctgccccttcgacaccatctgcgacacctcagccgaggttttacccgtctgcctggcaagcaaagacagcacaggaacaccagccatcgtaagctgcaacatgtcatcgccctgcaacttaccgcgagccataaccgacgtaaaaatagcgcccgtatcctgaaacgacttaccagaaatataagacacatccgcgacagtcttcaacacatccgtcatctgcccgccagacttcacacccgaagcagacaacgccgccgcagtagaagccgcatcacccaacgcatacgacgtaccagtcacagcctcaatagccgaattcataatcgaagacgtgtcagacgatgtgtgacccaaaccagtcagtttagcctgagcctcatcgatagccatagcgcgagcaataccgccaccaatagtcacatcatagatagacttcaaacccttcttggcaacattgatagcacccaccattgcggcgccaccaagagccaacttcatgcccttagcaaaaagactacccaaacgctgaccctccgcaggcatcaccccagaaagctgtttaccaacatccgatttcaaaccaggcatcttcgtatacaacgacacatatgcggaagcaatctcaccagacatacactattcaccccataatattaatctcgcgagacaccccgccacaggcacgaacacgcgccaaaatatcgtccacctgcccagacgtaaaccgggccctacgctcatccgtaggcctcgccacaggctccggctgcccctcactattagcagacctgtaatgatccagcatgtccaacacagcccactcacaccactcaaacgggcgctgccaaccattcaggtgggccgccaactggctcgacgtatcaccacacaacacgccagccagccggacagcctcaccgtaacacatcaccgggccaccaacatcataaaccgagcaaccgaaccgggtcctccaatcatattcgatggccccacgataatcatcaatcaggccgtggagccaaattattcccccagggaggcacccttaccgtcaggcttgtattccatccactagcggaaaatctcggcaacacgaaccataggaagcccctccaaggcctccacagcatcctctggggcggcagcctccaacatggaaaacatcacctcaacctgggcgaaatccgcagactcacccgactgggcaatcctggcggcacggcgaaaaacgcgggcaggaacagcctgcgctgtttcctccgcatccgccaacacccagctacggtcaccaatcttcaacgtgtaacctgtgtcactcatctatcaacaatccctcaaactatgtgtatcagttattagacggcggattaggatccggctcaggcttaggagaaggaggaaccgggggagtatcagcttttaaagccgtcatccacccccgacccgacaccgcattaccagtcttattaatctgggcaggatacgccttcaacgtcacaccatacccgtacacttcgccattcttacccttaatctcgtcacgatcaatgagctcaacctcagggaaatagtagcgaataacctgatcgccatcaacaatatccatcagtaaagcgtgcacgccagtggtggcaccaggagaaatatcgaacgaacccgaatcggatccggcagtaaccttcgactgcctaaacagcccgataacctccttcttagactcgatcagctggaaagaaatctcgatagacgactcggtagcaaccgtgcgaacaacatccgcattctgccaagccttcaaatcatcagttttacgctcaggcttaatcttaaacccgtcatccgacagataccctaaagctgtaagcccggaaggaaccggctccacacccttaatagtatcaccctcgtgcgcgtcaccaatatacacgtcgccagtaaccgctgaacgaacattagacgctttacgtgttgcagccatcacaactcccattaaatatcaaacaattacattaaaacaaaaacaataagcttattcagactccgcaggcctacatatcagctcaaaaagcgaatacacatcaaaacgtgcaccatcaaccagcaaatcaggaccagtagaccgtttacagtacaccacagggtcaccgtccacaccgtcagccagaacagcctcaacacgacgcgccaaagacatagcccgatcaggcgtatcagaaaacacattcacgcgcaaaaaaacacgctcgcgcacatgcaactgcgggccaccatccaacgccaaccaaatcaggtcacccgtaaaatcatcgggcaccgtccccacacagggtatatcagacagccagccatcatccttgagctcgcgtttagcccacttcctggggtcatcgtagacgatcacgacgcagccccaatcgaacgagccagcgtgccatgcttcgcctcaatacgcttcccacccctataggtggtaccaatcctcgccacagcctcaacccggtgaacctgcacctccgacgacaaaccattacggtattgggccttatcgaaagcattaccgcccacattcgccgaggctgcacgcttgacacgctcaccacgctcagccaacatgccctgcaccccagaagacttcaacacctcacgaatacccggcaagttcagcttcacattcacatcctgagccactacccatcagcccttcttgcgcttcacattgatctgcgtaccagcatcccagccagacatcggatgatgccacaccataggagacccgtcagcctcccacacaacaccccgaatacgccacctacaacgatatccagcacccacaacagactgcttggaaagcatcgaccaatgctcataatccgagtcacgccccgcggcctcatcctcctgcgaaacagaagcatagatggccacattatggtacacagtctcgacaggcttagaccagtcttccaccttgtcgccaagatcatcgacacgaacagtcggctgaagcatcacaaccgtttcaccataaggaaaactggtcatatcatatctctcacaaagggccagcgtagccgttaatattcgacccgcacgagcaaccctcaccccacaccgtggaacacacctcagaatgattcacactactcctcatggtcggtgtaatagtgaacgccttaccagccccaccatcaccctcacacagcttcttcaacgcggcaatctcagaaggccacaacaaattcgtgggagtactagaccgtgtagtctgagcgaaaggacccgcagactcatactgcacctgacccgacacgccagtatcattccagcgcaacaaagccctgcgcagaatagccttagcggcatccttgtatttgaaatccggtttagcgatacagggggcgacactgacagccacagcctccacatcggcaatcatcgcctcaagcttctctctaggaatatcggcgaaaggctcaatatcctcaggcttcaaaatgatacccatcaacaccaccccctgcacatatacatatcaccgctacaataaatcagttaccggccggcggattaggcttcggggcagccttctccttcacaacagcaaacgaatcaagcgactcgatagccacatacagcacagcctcggcacgaaccataacctcattatggcccttcagatcacgcccagtctgatccggatcgccatactcgatcagctcgatcgggaagttacgctggaaaccccaatggacacgagagaaatcaccaacaatcgccttaacaccagaagcaggcgacatctcaggggcacccgaaacagtcgaagaagaaccaacattcaagccgcgccaattatcaagccccgcgaaaccagctgcaggatacatcggctgaccggcaagaggagaccccttcggatacacctcagtagacagggcaaacgagaacgccggatccaaagcaacaccgttaggaacctgcaaaccagcaccagcaatcaaaccaacagccttaacaagatcagccgtagcggaatccgtggcatcaaccgtcttcgacgtcttatccagcgacaccttcacagccgtggcaggcttacccgtagccggatcgataccatggaaagcaatcagatccacggcgcgaccaatcgaggcacccagagcgggagaaatcagatcctgaagcacacccagacggtaatcggcgtcagcccacataaactcgtccgagacacgctgctgagtcacaaccttgataggctgcgcagtaaacgccgaaacatccaccgatgcggaaggcttaacctcgccctcgccaacaatcttagcgcgaggaacaccgctaaacatggcacccttaacaggcccgaaaatagtaggctgctccggcgacagcttcgccaaaacaccagaatcgatagcacggtcacgaaccgcaccaatcatagaaccaggaagctcaagcttccctgcagaaagaaaatcgtcagccattataaatcatctcctagaattattgacaagagcatccacaaacgcgacaccctcacgtcgtttaacatcatcaacgggggcactccccgcaagacggcgcacacccgcgccaccaccactactctggtcgatcaaacccttcaaagccttagcggactccaccagtgcttcacgatcgccaccgtgcaagaaagcaatcgcatcacccgacaggccacactcggcagccacctcacgcttcacaccctcaagaacaaacccattgatccggtcttcgagttcctcattcttgcggcgaagatcatcaatcacagaccccgcatcaccatccgaggcgcgaagcttctccaactcggcgaaattacttttagcacgagactcccacttaccggcctccgccttccaatcagtccccagcgatttaccctcgccttcattcttcaactgattgtcggctacctcctgcccgccatcgtcttttaccgtatcaacaatgccgttatcctttccagactccacaacatcattgtcaacattctgttcctcaacactctgatcggccaaagcctaaccctatactccttgcggagaacaacacaacattgttgacccccgtgcgggagacaaccctgtgcaccgataaccggcagcgcacaaccggaaaccatcatctcatgtcgccaacagtacgcatagccttcaaaatattgccaggcgactgctgcaacccgtgatcatcaacccactcacgagccttctcatacgtcctctgatatgcggcatcagccctatttggttcccaagggccaacaacctcaaccaccgtacaaccacaatgatcatgatacttcgaaccaaacggacgcttaccaccacgcttatgacgccgcgtatgtccagtagtaagtgccctttctttggtcgtataatccgacctcgtagccaacatggcacaaaaagcacacggatcaccatcagtcacccgacgccacgacctaccctgcgcacccgccgaccactcaaccgtgtcacgaccagcattcataacagcccgatcaaaacccgcagccatcgcatcaatcgtatcattcgccctatccgggtcactcttaagaatcttcatagtcgaaaacgacctagccaacgcggcggcagcatcaaactcgtcatacacgatcaaacccggatccacaccattcaaccggcgaaaatccgacacaaacctggcggctaacgatgccgagccatcatggccggcacgctccaactccacacacaaacgcacatactgcgtgtcactcatcctgccggcacgccacaaacgaccaagctcagaataatagcccgcatacttcccagcaaacccgaccgcctcacgctgatactcagtcgcagcaagcctcgcctcaacccccgaagccatcgcctatcatacctcgttagtttgacgcgatatagccccagccagtgccgccaacgggtcagacgactcagcacgatgacgcatcacagcctcaacctgcacatcatcaagccccaacatctccaacaccgtacgagaatcagcaggcaaaataccggccccaacaagcttcgtcacagcatcagccgtagccgcccgggtaggcgtcgaagcatcacgccaacgcaaaccaacatcaccaaaaaacgcggcctcatcaacacgagaatccaacgccttggcagccaaaaaaccaaccgacagccagccctgaccaaacgacgtttgacgccgctcagcacgcttcacaagccgagattcctcggcagccaaagcctccccactaggtgggttagacgtgataaacccgaaatagcgttccggaacagccgcctcacccgcagtcaactgcgccaacagccgcatctgatcagaatacggtgtaggactattgacaggaaacgaccccacattcggagtatcaccgtcatcatccttatccacagcccacaccgaagccatcgacaacacccagccaggctgcgaaaactcatcagccgacacaccagtcacccacctttgcggataggcatagaaatcacgattcacagactgccccaacagtgggcgcacagcctcatccgtgtaagccctaatagacctcgtaatctccgaacggccatcaatacgcgacgtcctacgccgattcacaatcggcaccaacggaaccgccccaagcacattcggtatacgatccacctcaacccactcacggctacctcgccgctccaccggaacaatcacatcaggcaacaacaactccgcctcaacaacctcaggatcacacgtctgctgcaccacaaggccagcatccagacgagacccgtcagccgaaaaccggcctgtacagttcttgggtgactgcggacgaacagaaacagtgccatcaccgccaggaatgatagccacaaacgacaacccaaaaatcagcgcatccaaatgcacatcacacgaagtcgtagcaagccgattcgcagcatacacaccatccaggccgtagccgtcaccattagtccagccaagccaatccagacgctcctccaaagcatccacagctataccaggccacgacaccacagtctgcacacgctgcaactccggaggaatggccacccccaaatcacgcacccgattcgaaccctcatagtagccctcaatacggcaatgccacgaagacaacctttgaatccgatcaaacatgccctcaatcaaagccaactcatccgagttcataccacagacacccgcttcctaccagaccgttcacgccgcttcgctttcgccatcttcgcaccaagatacgccaacgacacagcctccaaaggcacctcagaaccatccttaaacgaggaaccccaaccacacgcagaacccttcttcttctgcacagccgacctc

SEQ ID NO: 41 - DNA, 2173 bp, Pahexavirus sp.
  source 1..2173: mol_type = genomic DNA
ggtgaggatagtcgcgcgccgtatgtgtctgatgaggagtggttgtttctcatggatgctgcggtgattcatgattgtgtgtggcgtgagggtcgcgcggatttggtggcttcgcttcgtgctcatgtgaaggcttttatgggtatgttggatcggtattcggttgatgtggcgtctggtggccgtggtgggggttctgcggtggcgatgattgaccggtataggaagcgcaagggggcctgattaggtgtctggtgttgttgggtctcaggttcctcgtcatcgtgtggctgcggcgtattcggtgtctgctggtggtgatgctggggagttgggtcgtgcgtatgggttgacgcctgatccgtggcagcagcaggtgttggatgattggctggctgtggggggtaatggcaggcttgcttctggtgtgtgtggggtgtttgtgcctcgccagaatggcaagaacgcgatccttgaggttgtggagttgtttaaggcgactattcagggtcgccgtattttgcatacggctcacgagttgaagtcggctcgtaaggcttttatgcgtttgcggtcgttttttgagaatgagcggcagtttcctgacttgtatcgtatggtgaagtcgattcgggcgacgaatggtcaggaggctattgtgttgcatcatccggattgtgccacgtttgagcgtaagtgtggttgtccgggttggggttcggtcgagtttgtggcccgttctcggggttctgctcgcgggtttacggttgatgatttggtgtgtgatgaggctcaggagttgtcggatgagcagttggaggctttgcttcctacggtgtctgcggctccttcgggtgatcctcagcagatttttcttggcacgccgccggggccgttggcggacggtagcgtggtgttgcgtcttcgcgggcaggctttgtcgggtggtagaagaattgcgtggacggagttttcgattcctgacgagtctaacccggacgatttagctcgacaatggcggaaattggctggtgacactaatccggcgttggggcggcgtcggaattttgggactgtgtcggatgagtatgagtcgatgtctgctgccgggtttgctcgggagcggcttggctggtgggatcgtggccagtctgctgcgtctgtgattccggcggataagtggtcccagtctgcggtggatgaggctagtttggttggcggcaaggtgtttggtgtctcgttttctcgttcgggggatcgtgtcgcgttggcgggtgctggtcggactgatgctggggttcatgctgaggtgattgatgggctgtcggggacgattgttgatggtgtgggccggttggctgattggttggcggttcgttggggtgatactgaccggatcatggttgccgggtctggtgcggtgttgttgcggaaggcgttgacggatcgtggtgttccgggccgtggcgtgattgtggctgatactggggtgtatgtggaggcgtgtcaagccttcctggaaggtgtcaggtctgggagtgtttctcatcctcgtgccgattcgaggcgtgacatgttggatattgctgtgaggtcggctgtgcagaagaagaaaggttctgcgtggggttggggttcctcgtttaaggacggcagtgaggttcctttggaggctgtgtcgttggcgtatcttggtgcgaagatggcgaaagcgaagcggcgtgaacggtctggtaggaagcgggtgtctgtggtatgaactcggatgagttggctttgattgagggcatgtacgatcgtattcaaaggttgtcttcgtggcattgtcgcattgagggctactatgagggttctattcgggtgcgtgatttgggggtggctattcctccggagttgcagcgtgtgcagactgtggtgtcgtggcctggtatagccgtggatgctttggaggagcgtctggattggcttggctggacgaatggtgacggctacggcctggatggtgtgtatgctgcgaatcggcttgctacggcgtcgtgtgatgtgcatttggatgcactgatctttgggttgtcgtttgtggctgttatcccccaagaggatggcactgtttctgttcgtccgcagtcgccgaagaattgtactggccggttttctgccgatgggtctcgtt

SEQ ID NO: 42 - DNA, 12701 bp, Pahexavirus sp.
  source 1..12701: mol_type = genomic DNA
atcggccacagacagcttccttttcggaacaccatgcttgtcacacaactgccgacacaggatggcagccttctccaccgcaggccacacacgaggatcaagccactgctcccgagtgtaagcatgccccggcacccggaacgaggcgtgcgaacccccatccgcgcaaatctctatacccaaagaatgcgggttaggcggggcatgccacccaatcgtagactcggacaggcactgcaccgtctccctaatatcacacacataatgggcagaaccaccagacgatggggacgcgaaatagtttgctgtagacaccgcccgtcctttacgtgaggcggacggaaaccccacatccgggcatgttgcatgaatcacaaccctattcaccggactattcgaaccggcagagtgatgcgccgctggaatgtatctcaccacacaccaccaccaaacacgaccaacactagtaacacccttccctcttcttgttcacctatgggatgatacggtaaccacaggtgatggtttcacactctcgcaggctgcagaacccgatattgtagaggccgtaccgtcactatatttcacaaccaggcggccctcagaacagtacacagacaccaccgagcgcccatccttgccgtccttaccattcttaccatcggatccgttcgcaccggcggggccgcgctcaccacgttcaccctgtgcaccttgcgggccggcaggacctgaagggcccacatcaccgcgctcaccagccgaaccatcccgaccatcagcgccatcaactccattcgcaccgtcagcacctgcacggcccggaacaccatcatggccatctgattcattcgcgccaggcagcccgtcaggacctttcacaccattcaaacccggggaaccctgcggaccaacagggccaaccagcccagccgaaccattaacaccatcccggccgtcaacccctgcagggccctgcgggccgcgctccccggccgggcccggcacaccctgcacactccgctcaacacgcacagcatccacacacaagccagaacggtgaagccgcaccgactcctgcccgccagaggcacacacctgccgcacacgggcagccaaccctttagcggctgtaccattagactgggctttagcctgctccgaatccctttgcgaagccacagacccgtaccgtaaagcacccgcagcaaccaccatcaacagtacaagcgacaggaacaacagtatcagggaagccttctcaaaattgcggcgctgccgcttctcctcctccaactccctcaaccctactcacctccaccatcaacagtatccttcaaaaactcaggcaaatcaggaagatgcatcggctccacatcatcaggaagcccggcgttaaaccttcgcacctcgcgccgcacaccccacgtatactcttccatcgcatccacctgcgcagacagcctgcgtaaacgcttcctagaccgggatgtgatagcctgaacagaacccaaaaccgtggccaacgcggtacaaatagaggccaccagtgcaggagtaaaccacgacaccacagccccccaatatcacaacatcagccgccacagcccggtcacacgccgacagcaatccagttagcaaccgcaggcacattagaaggcttagacccgtcattcgtgataaacgctaaaccaaaatccttattagtaacattgtaggctttcacatcaatctgctgcgtaccaccagccgccgtagccatagacgccaccacaataggcggactactgaactggcgctcaaacggaatcgtgtaagcatacacagcagaaccaccaaacatgatcgacttagaacccgtctcgatacgcggagacaacagcatccactcaccagcatgattagcccacacagcccccgaaggcaccatcacacggtcaccctccacaggggtagggtcacacgcagcagactcaccaaacgccacacgagccgccacagccctcctgtcaagctgctgctgcaacccgttagacgacgacaccaaagtcgccaacaactgctgatggtacacgccaggctcagcccttaacacgtcacgggcacgctccgcacggccacccggaacaatctccaacttggccgtattctgctcccaatcccgagacaggaccacatagtcataacgggtctcgccagggccaggcagctgccctgtcaccgtctcaacactactagaagtgcacatcaccccgtgagcccaagcctgccccggcaacacctcacacaacacagtggcaccctgaacagtagtgcccacacgaaaatcgtccggccctttcacgaacggcatattacccatcagaccagacatttgagcccaatcatactcggtcaacacaccatcaaaacccttacacacaatacccacaacaaacccccaattcttttctaaaatttttgcaaatcccgcacaccggcagccaaaccggcgacacggcgagccaacaacgccgacggattatcctcataatcaccggcaataggagtaaccttcgtccacccgtcaccaggcgaatcacactcaacatcaatctgccgcacaatctctgcgatagggccagagcccacatccacatagatcaaatccccaggcatcagcttgcccggcccaaaacgcagcacatccgactccgccaactcgatcttaaaccccgacgaagcctgcaactcccccaacacccgctcagcctcatcgatgagatgcacatgttcagaatcagtgttacgggcatccttaaacacctcgacacgatcaaaccactcatcctcggccatcgaatcaacatcctcgcaaaacagccgatccttgccctcgccgcggccacccacaaccaccgaagtagccttcggggcatcacgcacatactcccacgacacaatcgaaccagactcggcagtcaacacatggtcacgcgtcacagcaggcacacaatcaaacagcaaaccccgctgatcctgcttcgcattctcaaactggttcaccgtgacagtcatccgagcccacgacaacaccggcaacaacttatcggcaaacacgtgaaaccgcacctgaaaatccttaatatagcgtccacgaccctcatcatcgttcataaacaaaccaggcggaaaacgccaagcattatcccgcaacgccttcttagcgaccgactccgcagcaccagaatagtgggcataatccctgtcggcacgccactccataccaaccaaaccaggacgataattcacaggccacatcagcatacgccacaacaggcgaatatcatcctcacacgtgatagtcacccgcgaagaacgccaaggacccacaccatgaacccgacgcacaggcccagaaaaaatctggccaccaccataatcaacaaccagccgtgcacccggcttagtcaacccgtcaagcctagaatgatcccccgataccaccaactccagcgtagacaaaccattccacttcaacgacagtttcaacgactcaaaaaaattgataggcgccacacgacgataatccgacgtaaacaatgttacatgcggaacaagaccagccatcaaccattcaccaagccctcaaaaacctgtaccgcactgacacaacaatggcacccaaaccaaccatctcaatattcacactcttcgaaccgccaggcgggataggcgcaaactcccactctgtcaaacgatccatcacatcctcaaacccgttcaacaacgcagactgctggcgaggatccgtatcaatagtgatccaatcatactcctctaccgggtaatccgaagacacacgcaaaccatcaatctgcacagaccacgactccaaaggcccctcaacacgaatcacaggccacgcaggcacatcacccttattagacagattatcccaaccagagcccataccaggcgtcaacaccacaggaaacgccgtaccatccttgccgacagggccgccacccaaccaatcctgcaacttcgcgttactgaaacgaaacttctgctcatccccataccaaaacgggtcataggctgtcaaatgcaacagatagcgcgcatagccacgattaaccggatccaccgtaaacgtgtcatccaccgaatcaaaccggcattttagcacacgctcaacaccggcaggagtcttcaccgacaactccccctcctcgcccgggaggaaacgcagaccacaactcgtcataggctttcaaaaaaccgtcacgaaacccgcccaccggatccgggtcaacacccgacaccaacaccggcagcgtcacctcgcgaggcttcacattaaacccgcgccactccgaaccgtgcacccccacatgagtttgagaaaaatgctccacctcgggcacacccaggccgcgcaacgaatcattcaacaacatgacaggagacgcacccgtataatccgtcaaatgaagcacacgctcatcgccaaaccgcggatccatcgaccatgtcacagtcaaaccagaacgatcagacgggtcagggataaacatgcatacccctttactcacatgtaagccaacgcgttcaaagcgtcacgctgctgacgctcaatccgcttcgcaaactcggcaggatcaccatacgtcgggccattcacattcaccacaacactctcacccttggcacgctgataccggtcgtacggggtaaacgagcccaccgatgatcgcacaccaaaccgggcatcaaccgcatccggaagccggccagccacacccgacatagcatccaacgccaaacccgcattaccagtaataccctcagccaaaccggcaacaacctgacggccaacctggtcacgaaacacccgagacggtgaatgaatacccaacaccgatttagccgcattagcaacttgggaacccatgttacgcaccgtatccagcaggccactcatagcattcttaataccgttacccaaaccggcaacaacactatggccagcagacaccaacagggaccccatgttacccaaggcgcccctaatattgccgggcagattccggaaaaaccctaacacactatgcacaccggaagacaccgcggaccccatagcatgcatagcagaagaagccacacccctcgcagcgttaaacccggacgaggcagcaccacgaacacgagacgccatcgacccggaaaacccgccaacagcagacgccaccgaagacacaacactccggatagcattcatcgcagaagaaacagcactacgggccgcgttaaaaccagacctcacatgggaggcaaccgaagaacccatccgggcaaaaaacccaacaacagcgttcacgccgccggaaatcaccgacttgaaaccgttaataaacgcagacgtaaacgctctaatatgattccagccagcctgaaccaccgaacccatacgcgccaaaccagacacaaaatgggcaacaacccacgagatgacacgggcaacagcggcaataacacgggccacagccgacacgacagcaccaacaatacgggcaacaaacccgaccacggccgccaccatcggagccacaacagcaagaatacgggccaccacctgcaacacaaccgcaacaacctgaaccaccacacgcataacagacatgatgactggtatcagcgaccggatcaggccgatgataggcggcagaacagacatgacagcacccaaaatctgttgaatcacaggcatcaaaacaggcaccaactgcatgatcacgccaacaacctgccgtatcacagcaacatccgcctgcaacaccggcatcaacgcgggcaacaacattgcagcaacctgtgtcaccgcaccaataatctgcgtgatcacaggaaccagccgggcaacaagcataccaatcacaggcaccagctgcgccgctagcccggcaaccataccgataatctgggcaaacactggcgccaaccgtgccgccaaaccagcaattagaccaaacacaggctgcacagcggccataatctgccccaaagcctggccaaccacagccacaagctgcatcaccgcggcacggaactgggcattcgtggcaaacattcccgcaaacaagccgatcacaataccgacagggccacccagggcgcgaaacacgccgccaagcccgccagcggcacccttcaaagcaccaaacgacggcaacagattcttcaacgaaaccgccaacggggcaaaccctgcaacaagcttccccacaccggcagccacaataccaaacactgcggtgccgccagcaaacatggcagccaaattcactttagggacaggcaaatgcagcctcgcaaaaatgcccttcaactgctccgccttggcgcgcatctgtgcattcattcgtgtgatcatagccggcatccggttaatccacgccaaaatagacggcatcatccgctgaataccctgatcccccgacgcaaacaggggcttcacagaatccgtgacagacttaataaccggattcaacgcaacaaaaatctgccgcaaaccgttcaaaaacggggccatagccgtagcaccaagatagcccagggcgctcttcacattcttcatagcgccctcaaacgtcttaccagacgcctgcgcagcaccacccatgccaagcctcatcgcagccgcaaacgtgttaaaatcaatctgccccttcgacaccatctgcgacacctcagcagacgttttaccagtctgcctggcaagcaaagacagcacaggaacacccgccatcgtaagctgcaacatgtcatcgccccgcaacttaccgcgcgccataaccgacgtaaaaatagcgcccgtatcctgaaacgacttacccgaaatataagacacatcggcgacagtcttcaacacatccgtcatctgcccgccagacttcacacccgaagcagacaacgccgcagccgtagacgccgcatcccccaacgcatacgacgtaccagtcacagcctcagtagccgaattcataatcgaagacgtgtcagaagacgtgtgacccaaaccagtcagtttagcctgagcctcatcaatagccatcgccctagcaataccgccaccaatagtcacatcatagatagacttgaggcccttcttagcaacattgatggcacccatcatcgcagcaccacccaaagccaacttcatgcccttagcaaacaagctacccgaacgctgaccctcagccggcataacacccgacaactgtttaccaacatcagccttcaaaccaggcatcttcgtatacaacgacacatatgcggaagcaatctcaccagacatacactattcaccccataatattaatctcgcgagacaccccgccaccggcacgaacacgcgccaaaatatcgtccacctgcccagacgtaaaccgagccctacgctcatccgtaggcctcgccacaggctccggctgcccctcactattagcagacctgtaatgatccaacatgtccaacaccgcccactcagaccactcaaacgggcgctgccaaccattaaggtgggccgccaactggctagacgtatcggtacacaacacgccagccagccggacagcctcgccccaacacatcaccgggccaccaacatcataaaccgagcaaccgaaccgggtcctccaatcatattcgatggccccacgataatcatcaatcaggccgtggagccaaactattcccccagcgaggcacccttaccttcaggcttgtattccatccactgacggaaaatctcagcaacacgaaccataggaagcccctccaaagcctccaccgcgtcagccggggcggcagcctccaacatagaaaacatcacctcaacctgggcgaaatccgcagactcccccgactgggcaatcttagcggcacgacggaaaacgcgggcaggaacagcctgagccgtctcctccgcatccgccaacacccagctacggtcaccaatcttcaacgtgtaacctgtgtcactcatctatcaacaatcccctaaaatcgtgtatcagttctcagatggcggattcggatccggctgaggcttcggagaaggaggagtatcagcttttaaagccgtcatccacccccgaccagacaccgcatcacccttcttattaatctgggcaggatacgccttcaacgtcacaccatacccatacacctcgccattcttacccttaatctcgtcacgatcaatcaactcaacctcagggaaatagtagcgaataacctgatcgccatcaataatatccatcaacagggcgtgcacgccagtggtggcaccaggagaaatatcgaacgaacccgaatcggctccggcagtaaccttcgactgccaaaacagttcgataacctccttcttagactcgatcagctggaaagaaatctcgatagacgactctgtagccacagtgcgaacaacatccgcattctgccgagccttcaaatcatccgttttacgctcaggcttaatcttaaacccgtcatccgacagataccctaaagcggtaagaccgtcaggaaccgtcttcacaccatcaatagtgtcaccggcatgagctttaccaatatagacgtcacccgtaacagcagagcggacattagacgctttacgtgttgcagccatcataacccccattaaatatcaaacaattacattaaaacaaaaacaataagcttattcagactccgcaggcctacatataagctcaaaaagcgaatacacatcaaaacgtgcaccatcaaccagcaaatcagggccagtagaccgtttactgtacaccacagggtcaccgtccacaccgtcagccagaacagcctcaacacgacgcgccaacgacatagcccgatcaggcgtatcagaaaacacattcacccgcaaaaacacctgctcacgcacatgcaactgcgggccaccatccaacgccaaccaaatcaggtcaccctcaaaccggtcaggcaccgtcccagtacacggtatatcggacagccagccatcatccttgagcactcgtttagcccagactcttgggtcaccgtaaacgatctcgacgcagccccaattgaacgagccatcttgccttgtttcgccttaatacgcttcccacccctataggtggtaccaatcctcgccacggccttaacccggtgaacctgcacctccgatgataaccctgcacgatactgggccttatcgaaagcgttaccgcccacattcgccgaggctgcacgcttgacacgctcgccacgctcagccaacatcgcctgcaccccaggggacttcaacacctcacgaataccaggaagattaagcttcacattcacatcctgagccactatctatcagcccttcttacgcttcacatgaatctgcgtaccagcatcccagccagacatcggatgatgccacaccacaggagacccgtcagcctcccacaccacaccccgaatacgccaccggcaacgataatcagcacccttgacaggctgcttgaacagcatcgaccaatgctcatagtcagagtcacggcctgccgcctcatcctcctgcgacaacgaagaatagatggccacattatggaacacagtctcgacaggcttagaccagtcttccaccttgtcgcccaaatcatcgacacgaacagtcggttgaagcatcacaaccgtttcaccgtaaggaaaactggtcatatcatatctcccacaaagggccagcgtagccgttaatatcagatccgcacgagcaaccctcaccccacaccgtggaacacacatcagaatgattcacgccacccctcatggtcggtgtgatagtgaacgctttaccagccccactatcaccctcacacagcttcttcaacgcggcaatctcagaaggccacaacaaattcgtgggagtattagaccgtgtagtctgggagaacggccccgccatctcatactgcacctgacccgacacgccggtatcattccagcgcagcaaagccctacgtaggatagccttagcagcatccctatatttgaaatccggtttagcgatacagggggcgacactgacagccacagcctccacatcggcgatcatcgcctcaagcttcccctcaggaatatcggcgaaaggctcaatatcctcaggcttcaaaatgatacccatcaacaccaccccctgcacatagtacacattcgcttatcttgtatcagttaccagacggaggattaggctcaggcttcggggctggaggaggagtcggtgcagccttctccttcacaacagcaaacgaatcaagcgactcgatagccacatacaggacagcctcggcacgaaccataacctcattatggcccttcaagtcacggccagtctgatccgggtcaccatactcgataagctcgatcgggaagttacgctggaacccccaatgaacacgagagaaatcacccacaatagccttaacaccagaggcaggcgacatctccggggcgccagaaacagtcgaagaagcaccaacattcaggccgcgccaattatccaaaccggcaaacccggcggcaggatacataggctggccggcaagcggagaccccttcggatacacctcagtagaccgagcaaacgagaacgccggatccaaagcaacaccgttaggaacctgcaaaccggccccagcgataaggccgacagccttgaccagatcggtcgtagcggaatccgtggcatcaaccgtcttcttcgtcctatccagcgacaccttgacagccgcggcaggcttcccagtggcaggatcaataccgtggaaagcaatcagatccacggcgcgaccaatcgaggcaccaagagcaggggaaataagatcttgaagcacacccagacggtaatcggcgtcagcccacataaactcgtccgagacacgctgctgagtcacaaccttgataggctgcgcagtaaacgccgaaacatcaaccgaagcggaaggcttaacctcgccctcaccaacaatcttagcgcgaggaacaccactaaacacggcacccttaacagggccaaaaatagtcggctgctccggcgaaagcttcgccaaaacaccagaatcgatagcacggtcacgaaccgcaccaatcatagaaccaggaagctcaagcttccctgcagaaagaaaatcgtcagccatcacaaatcatctcctagaattatggacaagagcatccacaaacgcgacaccctcacgtcgtttaacatcatcaacgggggcactccccgcaagacggcgcacacccgcgccaccaccactctggtcgatcaaacccttcaaagccttagcagactcggcaagcgactctttatcgccacccgacaagaaagcgatcgcatcactggacaggccacactcggcagccacctcgcgcttcacaccctcaagaacaaacccgttgatccggtcttcgagttcctcattcttgcggcgaagctcatcaatagtagaccccgaatcactatccgaggcgcgtagcttctccaactcggcgaaattacttttagcacgagactcccacttacgggcctcagccctccaatccgtgccagaagaagaatcctccttcacggaaacatcaccggcatgatcatcgccggcagcctgcccatccttcacaacatcaacaacgtctccaccctttccgggctcaacagcatcattgtcaacattctgttcttcaacactctgatcggccatagcctaaccctatactccttgcggaaaacaacacaacattgttgacccccgtgcgggagacaaccctgtgcaccgataaccggcggcacacaaccggaaaccatcatctcatgtcgccaacagtacgcatagccttcaaaatattaccaggcgactgctgcaacccgtgatcatcaacccactcccgggccttctcataaacccgctgatactgggtgtccgcagcattgggctcccaacgcccaacaacctcaaccaccgtacacccacaatgatcatgatacttcgaacccagcggacgcttaccgccacgcttatgacgccgagtatgaccagtcgtgagcgccctttcctaagtcgtataatccgacctcgtagccaacatggcacaaaaagcacacggatcaccatccgtcacccgacgccaagacctgccctgcgcacccgcagaccactccaccgtgtcacggccagcattcaacacggcacgattaaacccaaccgccatatcatcaatagtatcgtgggctttaaccggatcacccttcaaaatcttcgtagtcgaaatcgaccgagccaacgccgcagcagcatcaaactcgtcatacacaatcaaaccaggatccacaccgttaagcctacgaaaatccgaaacaaaccgggcagccaacgacgccgacccatcatggccggcacgctccaactcgacacacaaacgcacatactgcgtgtcactcatcttcccggaatgccacaaacgaccaagctcggcataatagcccgcatacttcccagcaaacctgaccgcctcacgctgatactcagtcgcagcaagcctcgacgcaaccccagaagccatcacctatcaaacctcgttagttgacgaagaaaagccccccccagcccccccaaccgaagcga

SEQ ID NO: 43 - DNA, 11578 bp, Pahexavirus sp.
  source 1..11578: mol_type = genomic DNA
ccctgttaagggtgccgttttttctggtgttcctcgcgccaagattgttggtgagggcgaggttaagccttccgcttcggttgatatttcggcgtttactgcgcagcctatcaaggttgtgactcagcagcgcgtaagcgacgagtttatgtgggctgacgcggattaccgtctgggtgttttgcaggatctgatttcccctgctcttggtgcttcgattggtcgcgccgtggatctgattgctttccatggtattgatcctgctacaggtaagcctgctgctgctgtcaaggtgtcgctggataagacgtcgaagacggttgatgccaccgatagcgctacggctgatcttgttaaggctgtcggcctgattgcgggtgctggtttgcaggttcctaacggtgttgctttggatccggcgttctcgtttgccctgtcgactgaggtgtatccgaaggggtctccgcttgccggtcagcctatgtatcctgccgccgggtttgccggtttggataattggcgcggcctgaatgttggtgcttcttcgactgtttctggcgccccggagatgtcgcctgcctctggtgttaaggctattgtgggtgatttctctcgtgttcattggggtttccagcgtaacttcccgatcgaactgatcgagtatggtgacccggatcagactggtcgcgatttgaagggccataatgaggttatggttcgtgccgaggctgtgctgtatgtggctatcgagtcgcttgattcgtttgctattgtgaaggagaaggctgccccgaagcctaatccgccggctggtaactgatttattgttgcggtgatgttttctatgtgcagggggtggtgttgatgggtatcattttgaagcctgaggatattgagcctttcgctgatattcctagagagaagcttgaggcgatgattgtcgatgtggaggctgtggctgtcagtgtcgccccctgtatcgctaaaccggatttcaaatacaaggatgccgctaaggctattctgcgcagggctttgttgcgctggaatgatactggcgtgtcgggtcaggtgcagtatgagtctgcgggtcctttcgctcagactacacggtctagtactcccacgaatttgttgtggccttctgagattgccgcgttgaagaagctgtgtgagggtgatggtggggctggtaaagcgttcacgatcaccccgacgatccgtggcggatatgctcattccgatgtgtgttctactgtgtggggtgagggctgttcgtgcgggtcgaatattaacggctgcgatggccctttgtgggagatataaggatggctggttttcctttcggtgaaacggttgtgatgcttcagccgactgttcgtctcgatgatcttggtgacagggttgaggattggggtcatcctgtagaaaccgtgtaccataatgtggccatctattcttctgtgtcacaggaggatgaggcggcaggccgtgactctgactatgagcattggatactgctttttaagcagcttgtcaaggatgctggttatcgttgtcgttggcgtataaggggtgttgtgtgggaggctgacgggtctcctatgatgtggcatcatccgatgactggctgggatgctggcacgcaggtgaatgtgaagcgtaagaagggctgatggttgtggcacgtgatattgatgtgaagcttaatcttcctggtatccgtgaggtgctaaaagcgccgggtgtgcagggcatgttggctgagcgtggcgagcaggtgcggcgtgccgcatcagcgaatgtaggcggtaacgcgttcgatagggcccagtatcgtgcagggttgtcgtctgaggtgcaggttcaccgtgttgaggctgtggctaggattggcaccacatataagggtggcaaaaggattgaggctaagcatagcacgttggtgaggtcgattggggctgcgtcgtgatcgtttacggtgatccgcgtgtgtgggctaaacgtgtgctcaaggatgatggctggctgtccgatataccgtgtactgggacggtgcctgacgatttcggcggtgatctgatttggttggcgttggatggtggcccgcagttgcatgttcgtgagcgtgtttttttgcgggtgaatgtgttttctgatatgccggatcgtgctatgtcgttggcgcgtcgtgttgaggctgtgctggctgatggtgtggacggtgaccctgtggtgtactgtaaacggtctactggccctgatttgctggttgatggtgcacgttttgatgtgtattcgctttttgagctgatatgcaggcccgtcgaatccgagtaaacgttttggtttgatattgttttagtttattgttgttgatattttttgggggttatgatggctgcaacacgtaaagcgtctaatgttcgctctgctgttacgggtgacgtctatattggtaaagctcatgccggtgacactattgatggtgtgaagacggttcctgacggtcttaccgctttagggtatctgtcggatgacgggtttaagattaagcctgagcgtaaaacggatgatttgaaggcttggcagaatgcggatgttgttcgcactgtggctacggagtcttctatcgagatttctttccagctgatcgagtctaagaaggaggttatcgaactgttttggcagtcgaatgttactgccggagccgattcgggtacgttcgatatttctccgggtgccaccactggcgtgcacgccctgttgatggatattattgatggcgatcaggttattcgctactatttccctgaggttgagttgatcgatcgtgacgagatcaagggcaagaatggcgaagtgtacgggtatggtgtgacgttgaaggcgtatcctgcccagattaaccataagggtgatgcggtgtcgggtcgggggtggatgactgctttaaaagctgatactcccccggttcctccttctccgaagcctgagccggatgctaatccgccctctatttactgatacacatagtttgagggattgttgttagatgagtgacacaggttacacgttgaagattggtgaccgtagttgggtgttggcggatgcggaggaaacagcgcaggctgttcctgcccgcgtttttcgccgtgccgccaggattgcccagtcgggtgagtctgcggatttcgcccaggttgaggtgatgttttccatgttggaggctgccgcctcagaggatgctgtggaggccttggaggggcttcctatggttcgtgttgccgagattttccgccagtggatggaatacaagcctgacggtaagggtgcctccctgggggaataatttggctccacggcctgattgatgattatcgtggggccatcgaatatgattggaggacccggttcggttgctcggtttatgatgttggtggcccgataatgtgttggggtgaggctgtccgggtggctggcgtgttgtgtaccgatacgtcgagccagttggcggcccacctgaatggttggcagcgcccgtttgagtggtgcgagtgggctgtgctggacatgttggatcattacaggtctgctaatagtgaggggcagccggagcctgtggcgaggccgacggatgagcgtagggcccggtttacgtctgggcaggtggacgatattttggcgcgtgttcgtgccggtggcggggtgtctcgcgagattaatattatggggtgaatagtgtatgtctggtgagattgcttccgcatatgtgtcgttgtatacgaagatgcctggccttaaaagtgatgttggtaaacagctttctggggtgatgcctgcggaggggcagcgttcgggtagtttgtttgctaagggtattaagttggctcttggtggtgccgcaatggtgggcgccatcaatgttgctaagaagtgcctcaagtcgatttatgatgtgactattggtggcggtattgctagggcgatggctattgatgaggctcaggctaagttgactggtttgggtcacacgtcgtctgacacgtcttcgattatgaattcggctattgaggctgtgactggtacgtcgtatgcgttgggtgatgcggcttcgacggctgcggcgttatctgcttcgggtgtgcagtctggcgggcagatgacggatgtgttgaagactatcgccgatgtgtcttatatttcgggtaagtcgtttcaggatacgggcgctatttttacgtacgtgattgctcgcggtaagttgcagggcgatgacatgttgcagcttacgatggcgggtgttcctgtgctgtctttgcttgccaggcagacgggtaaaacgtctgctgaggtgtcgcagatggtgtcgaaggggcagatcgattttaacacgtttgcggctgcgatgaagcttggcatgggtggtgctgcgcaggcgtctggtaagacgtttgagggcgctatgaagaatgttaagagcgccctgggctatcttggtgctacggctatggccccgtttcttaacggtttgcggcagatttttgttgcgttgaatccggttatcaagtctatcacggagtctgtgaagcctttgtttgcgtcggtggatcaggggattcagcggatgatgccgtctattttggcgtggattaaccgtatgccggctatgatcacaagaatgaatgcacagatgcgcgccaaggtggagcagttgaagggcatttttgcgagaatgcatttgcctgtccctaaagtgaatttggctgccatgtttgctggcggcaccgcagtgtttggtattgttgctgccggtgtggggaagcttgttgcagggtttgccccgttggcggtgtcgttgaagaatctcctgccgtcatttggtgctttgaagggtgccgctggcgggcttggcggcgtgtttcgcgccctgggtggccctgtcggtattgtgatcgggctgtttgcggcaatgtttgccatgaacgcccagttccgtgccgctgttatgcagcttgtggctgtggttggccaggctttggggcagattatggccgctgtgcagccgctgttgggtttggttgccgggctggtggcacggttggctcccgtttttggccagattatcggtatggttgccgggttggctgcgcagcttatgcctgtgattagtatgcttgtcgcccggctggttcctgtgatcacgcagattattggtgcggtgacgcaggttgctgccatgttgttgcctgcgcttatgccggtgttgcaggctgttgtggctgtgatacgtcaggttgttggcgtgatcatgcagttggtgccggtgttgatgccggtgattcaacagattttgggtgctgtcatgtctgtgctgccaccgattattggcctgatccggtcgttgataccggtgatcatgtctgttatgcgtgtggtggttcaggttgttgcggttgagatacaggtggtggcccgtattcttgctgttgtggctcctatggtggcggccgtggtcgggtttgttgcccgtattgtaggtgctgtcgtgtcttctgtggcccgtgttattgccgctgttgcccgtgtcgtctcgtgggttgttgcccattttgtgtctggtttggcgcgtatgggttcggtggttcaggctggctggaatcatattagggcgtttacgtcggcgtttattaatggtttcaagtcggtgatttctggcggtgtgaacgctgttgtggggttttttgcccggctgggttcttcagtggctagccatgtgaggtctggttttaacgcggctcgtggcgctgtttcggctgcgatgaatgctattcggagtgttgtgtcttcggtcgcttcagctgttggcgggtttttcggttcgatggcgtctagggttcgtggtgcagcctctagcgggtttaatggggcccgtagtgtggcttcttctgctatgcatgctatggggtctgctgtgtctagtggtgtgcatagtgtgttagggtttttccggaatttgcccagcaatattcggggcgccttgggtagtatggggtctttgttggtgtctgctggccgtgatgtggtggccggtttgggtaacggtatccggaatgctttgagtggcctgttggatactgtgcgtaatatgggttcccagattgcgggtgctgcgaagtctgctctgggtattcattccccgtctcgggtgtttcgtgacgaggttggccggcaggttgttgccggtttggctgaggggatcactggtaatgcgggtttggcgttggatgctatgtcgggtgtggctggccggcttccggatgcggttgatgcccggtttggtgtgcgatcatcggtgggctcgtttaccccgtacgaccggtatcagcgtgccaagggtgagagtgttgtggtgaatgtgaacggtcccacgtatggtgatcctgccgagtttgcgaagcggattgagcggcagcagcgtgacgctttgaatgcgttggcttacatgtgattgagggtgttgtgcatgtttattcctgacccgtctgatcgtgccggtttgattgtggattggactatgtttccgttggtgggtaatggtccggatcgtgtgcttcatttgacggattatacggggtcgtctccggtgatgttgttgaatgattcgttgcgcggtttgggtgttcctgaggttgagcatttttctcaaactcgtgttggggtgcacggctcggagtggcgcgggtttaatgtgaagcctcgcgaggtgacgctgccggtgttggtgtcgggtgttgacccggatccggttggcgggtttcgtgacggttttttgaaagcctatgacgagttgtggtctgcgtttcccccgggcgaggtgggggagttgtcggtgaagactcctgccggtgttgagcgtgtgttgaagtgtcggtttgattcggttgatgacacgtttacggtggatccagtgaatcgtggctatgcgcgctatctgttgcatttgacagcctatgacccgttttggtatggggatgagcagaagtttcgtttcagtaacgcaaagttgcaggattggctgggtggcggccctgtcggcaaggatggcacggcgtttcctgtggtgttgacgcctggtgttggttcgggttgggataatctgtctaataagggtgatgtgcctgcgtggcctgtgattcgtgttgaggggcctttggagtcgtggtctgtgcagattgatggtttgcgggtgtcttcggattatccggtggaggagggtgagtggatcacgattgatacggatcctcggcagcagtctgcgctactggatgggtttgaggatgtgatggatcgtttgacggagtgggagtttgcgtcgattccgccgggtggttcgaagagtgtgagtattgagatggttggttcgggtgccattgttgtgtcggtgcagtacaggtttttgagggcttggtgaatggttgatggctggtcttgttccgcagataacattgtttacgccggattatcgccgtgtggcgcctatcaatttttttgagccgttgaaactgtcgttgaagtggaatggtttgtccactttggagttggtggtgtctggggatcattccaggcttgaaggattgactaggccgggtgcacggctggttgttgattatggtggtggccagattttttctgggcctgtgcgtagggtgcatggtgtgggtccgtggcgttcttcgcgggtgtctatcacgtgtgaggatgatattcggctgttgtggcgtatgttgatgtggcctgtgaattatcgtcctggtatggttggtatggagtggcgtgccgacagggattatgcccactattcgggtgcggctgagtcggttgctaagcaggtgttgggggataatgcttggcgttttccgcctggtttgtttatgaccgatgatgagaagcgtggccgctatattaaggattttcaggtgcggttccacttgtttgccgataagttgttgccggcgttgtcgtgggctcggatgactgtcacggtgaaccagtttgagaatgcgaagtttgatcagcggggtttgctgtttgattgtgtgcctgctgtgacccgtagccatgtattgactgccgagtctgggtctattgtgtcgtgggagtatgtgcgtgacgccccgaaggctacgtctgtggtggttggtggccgcggcgagggtaaggatcggctgttttgtgaggatgttgattcgatggccgaggatgactggtttgatcgtgtcgaggtgtttaaggatgcccgtaacacggattctgaacatgtgcatctcattgatgaggcggagcgggtgttgtccgagtcgggggccacgtcggggtttaagatcgagttggccgagtcggatgtgttgcggtttgggccaggcaatctgatgccgggtgatttgatctatgtggatgtgggctcggggcctattgcggagattgttcggcagattgatgtggagtgtgattcgcctggtgacgggtggacgaaggtgactcctattgcgggggattatgaggataatccgtcagcattgttggctcgccgtgttgccggtttggctgccggtgtgcgggatttgcaaaaattctaattgttaggggtttgttgtgggtattgtatgcaagggttttgatggtgtgttgaccgagtttgattgggctcaaatgtctggtttgatgggtaatatgccgtctgtgaagggtccggatgattttcgtgtgggcacgacgattcagggtaacacggtgttgtgtacggttttgcctgggcaggcttgggcgcacggtgtgatgtgcacctcgaacgctgttgagacggtgacggggtagcttccgggtcctggggagacccgctacgactatgtggtgttgtctcgggattgggagcagaacacagccaagttggagattgttcccggtggccgtgcggagcgtgcccgggatgtgttgcgtgccgagcctggcgtgtaccatcagcagctactggcgactttggtggtgtcgtctaacgggttgcagcagcagctggataggcgtgctgtggcggctagggttgcgtttggggagtctgctgcgtgtgatcctacccctgtggagggtgacagggtgatggtgccttcgggggctgtgtgggctaaccatgccaacgagtggatgctcctgtctcccaggattgagacgggttctaagtcgatcatgtttggcgggtctgctgtgtatgcttacatgattccgtttgatcgccagttcagtagtccgcctgttgtggtggcgtctatggctacggcggctagtggtacgcagcagattgatgtgaaagcctacaatgtgactgccaaggattttagtttggcgtttattacgaatgatggttctaagccgaatggtgtgcctgcggcggctaactggattgctgtcggcgtgtaatgtacggcttgcgtggcgtgttgtggtggttgtagtggtagggggctgtagtgtcatggtttacacctacgcttgtggcctctctttgtaccgctatcgctactgttcttggttcgattcaggcggctacgtacaggtcgaagaagaggcttaggcagttgtctgcgcaggttgatgcgatggaagaatacacgtggaatattcgccatattgttcaccgctataacgcgaatctgccggagaatgttgatccggtgaagatgcctgatttgcccgagttcttgaaggatactgttgatggtggtggggggtgaattgtgagggagttggaggaagagaagcggcagcgccgctcgtttgagaaggcttccctgatactgttgtttttgtcgcttgtgttgttggcggtggttgctggtggtgctttacgtttcggtgctgtggcttcccagcgggattcggagcaggctaaagcccagtctaatggtacagccgctaaagggttggctagccgtgtgcggcaggtgtgtgcctctggagggcaggagtcggtgcgtcttcaccagtctggtttgtgtgtggatgctcagcgtgttgagcgtagcgtgcagggtgtgccgggtcctgctggtgtgcgcggcccgcaaggccctgcaggggttgacggccgggatggtgttgatggttcggctgggctggttggccctgttggtccgcagggttccccgggtttgaatggtgtgaagggtcctgacgggttgcctggcgtgaatggatcggatggccatgatagtgttccaggtcgtgcaggtgctgccggtgtgaacggggctgatggccgggatggcgtgccaggtagggatggcgctgatggtggccgtggccctgccggtcctgtgggtcctgttggtccgcagggttctgccggtgccgacggcacgaatggtcgggacggcaaggatggcaaggatgggcgctcggttgtgtctgtgtactgttccggggatcgcctggttgtgaaatatagtgacggtgcggtctctaccatatcgggttctgtggcctgtgagggtgtgaaaccgtcgcctatagtgactatatcatcccacaaatagaaaggagtggctgtgatggtagtgtttgggggtggcgtgttgtgagatacattccagcggcgcatcactcggccggatcaaataagccggtgaaccgtgttgtgattcatgcgacatgcccggatgtggggtttccgtctgcttcgcgtaaggggcgggcggtgtccacggcaaactatttcgcttccccatcgtctggtggttcggcgcattatgtttgcgatattggggagacggtgcagtgcttgtcggagtctacgattgggtggcatgccccgccgaatccgcatagtttaggtatcgagatttgcgcggatgggggttcgcacgcctcgtttagggtgccggggcacgcttacactcgggagcagtggcttgatcctcgcgtgtggcctgcggtggagaaggctgccatgctgtgtagacgtttgtgtgacaaatataatgttccgaaaaggaaactgtcggctgccgatttgaaggctggcaggcgtggtgtttgcgggcatgtggatgtgacggatgcgtggcatcagtcggatcatggcgatccggggccgtggtttccgtgggacaggtttatggccgtcgtcaactgtggtagtggtagtgaggagttaactgtggctgatgtgaaagccttgcatgatcagattaaacagttgtctgggcaggtggcccagtcggtgaaccggctgcatcacgatgttggtgtggttcaggtgcagaatggtgacttgcgtaagcgtgtcgaggctttgtcgtgggtgaagaatcctgtgacggggaagctgtggcgcactaaggatgctttgtggagtgtctggtattacgtgctggagtgtcgtagccgtattgacaggcttgagtcgactgttaacggttcgaaaaagtgatggtggtttgttgtgggtaaacagttttggttgggctcgtttgagcgtgccctgaaaacttttattcaaacgtttgttgctgtgttgggggtg

SEQ ID NO: 44 - DNA, 13892 bp, Pahexavirus sp.
  source 1..13892: mol_type = genomic DNA
ggatggactttcaaccgtgtgtctcgtgtaccaccggtcgcacgctcccggtttgtacactccccacactctcacaccccgtgcccctttacggctgagcgtgttcggctgaaggcgtacggcgtgtcacgccaacacccttaacactgggtaagatttaaagtgtatattatatgtagaagactttaaaaacctgtcaggtgttcctgcttagcctgtgtcctttaacgctgggcgctaggcggtaagctgtgaaacgcgaacacccaccccccttttttcttccgtgtccttctcttttgacacagctggggggcgatgtgatctttttcacatgccaggggttgtgggtgaaagagaaccaccccggaacgttcaagacaccccgccaaacgaacaaaacagggcttaggatcgaccagcagggcaccggtagggtaaacatacccccaacaccttctaggccgttacaggggcaatgagaggcccacaggggccataggagatcgggggacgcgatggcacacaccaaccgcacagccagccaagcccaccggcgctggcggcaacgactcatcacccaagcccgacagcaaggccaaaccgaatgcccactctgcggagtcaccatcacctgggacacacaccagctaccaaccagccccgaagccgaccacatcacacccgtcagccggggaggactcaataccctcgacaacgggcaaatcatctgcagaacatgcaacagaagcaaaggcaatcgcagcgaaccaaacatcaaattccaacaacaaaccacaaaaacattgattccatggtaaaaaacccgtcaacccccaccgggcacaccccctgcacacccgtgcaaaacctcgtacggcttagtgaaatacctcccttttgtggatttgtctgtttgtcgactttttgtgttggtggtgagtgttgtgcagcctgagcttcctgatagtcgtgattggtgtggggagacgcgtcgttggtggcgtgtgtggggtgaggatagtcgtgcgcagtacgtgtctgatgaggagtggctgtttctcatggatgctgcggtgattcatgattgtgtgtggcgtgagggtcgcgcggatttggtggcttcgctgcgtgctcatgtgaaggcgtttatgggcatgttggatcggtattcggttgatgtggcgtctggtggccgtggtgggggttctgcggtggcgatgattgaccggtataggaagcgtaaaggggcctaatgtctggtgttgttggttctcaggttcctcgtcaccgtgtggctgcggcgtattcggtgtctgctggtggtgatgctgggaagttgggtcgtgcgtatgggttgacacctgatccgtggcagcagcaggtgttggatgattggttggctgtcggtggtaatggcaggcttgcttctggtgtgtgtggggtgtttgtgcctcgccagaatgggaagaacgcgatccttgaggttgtggagttgtttaaggcgactattcagggtcgccgtattttgcatacggctcacgagttgaagtcggctcgtaaggcgtttatgcggttgcgttcgttttttgggaatgagcggcagtttcctgacttgtatcgtatggtgaagtcgattcgtgcgacgaatggtcaggaggctattgtgttgcatcatccggattgtgccacgtttgagcgtaagtgtggttgtccgggttggggttcggttgagtctgtggcccgtagccgtggttcggctcgcgggtttacggttgatgatttggtgtgtgatgaggctcaggagttgtcggatgagcagttggaggcgttgcttcctactgtgtctgcggcgccttctggggatcctcagcagatttttttggggactcctccggggcctttggctgacgggtctgtggtgttgcgtcttcgcggtcaggctttgtctggtggtaagcggattgcgtggacggagttttcgattcctgacgagtcggttccggatgatgtggcgaggtcgtggcggcggcttgcgggtgagacgaatcctgcgctgggtaggcgtctgaattttgggaccgtaagcgatgagcatgagtcgatgtctgctgccggttttgctcgggagcggcttggctggtgggatcgtggccagtctgctacgtctgtgataccggccgataagtggtctcagtctactgtggatgaggcgagtctggttggcgggaaagtttttggtgtctcgttttctcgttctggggatcgggttgctttagcgggtgccggccggactgatgctggggttcatgttgaggttattgatgggctgtcgggaacgattgttgatggtgtgggccggttggctgactggttggcggtttgttggggtgatactgaccggatcatggttgccgggtctggtgcggtgttgttgcagaaggcgttgacggatcgtggtgttccgggccgtggcgtgattgtggccgatactggcacctatgtggaggcgtgtcaggcgttcctggagggtgtcaggtcgggtgtgatcagtcatcctcgtgctgattctcgccgtgacatgttggatattgctgtgaggtcggctgtgcagaagcgtaaggggtctgcgtggggctggggttcctcgtttaaggatggttctgaggttcctttggaggctgtgtctttggcgtttttgggggctaaacgtgttcgtcgtggccgtcgggagcgtagtggtaggaagcgggtgtctgtggtatgaacgtggacgaattggctctgatcgagggcatgtacgatcgtatccaaaggttgtcttcgtggcattgtcgcattgagggctactatgagggttctgcccgggtgcgtgaccttggtgtggctattcctccggagttgcagcgtgtgcagactgtggtgtcgtggcctgggatagctgtggatgctttggaggagcgtctggattggcttggctggactaatggtgacggctacggtctggatggtgtgtatgctgcgaatcggctatcaaccgcgtcatgcgacgttcaccttgatgcactaattttcgggttgtcgtttgttgcgatcattccccaagaggatggcactgtttctgttcgtccgcagtcgccgaagaattgtactggccggttttcggctgacgggtctcgtctggatgctggccttgtggtgcagcagacgtgtgatcctgatgttgttgaggctgagttgttgttgcctgatgtgattgttcaggtggagcggcgtgggtctcgcgagtgggttgagacgggccgtatcgtgaatagtttgggcgtggtgcctttggtgcctattgtgaatcggcgccgtacttctaggattgatgggcgttcggagattacccggtctattcgtgcctatacggatgaggctgttcgtacgctgcttgggcagtctgtgaatcgtgacttctacgcctatccgcaaaggtgggttacgggcgtgtcggctgacgagttttcgcagcctggctgggtcctgtcgatggcttctgtgtgggctgtggataaggatgatgatggtgacactccgaatgtggggtcgtttcctgtgaattctcctacaccgtattcggatcagatgcgtttgtttgcgcagttgactgcgggtgaggcggctgttccggaacgctatttcgggtttatcacgtctaacccgccttctggggaggctttggctgcggaggagtctcggcttgtgaagcgtgctgaacgcaggcagacgtcgtttggtcagggttggttgtcggttggtttcctggctgcccgggcgttggattcgagtgttgatgaggccgcgttttttggtgatgttggtttgcgttggcgtgatgcttcgacgccgactcgggcggctacggctgatgctgtgacgaagcttgttggtgccggtattcttccggccgatagccgtactgtgcttgagatgctggggcttgatgatgtgcaggttgaggctgtgatgcgtcatcgtgccgagtcttcggatccgttggcggcgctggctggggctatttctcgtcaaactaacgaggtttgataggcgatggcttctggggttgcgtcgaggcttgcggctaccgggtatcagcgtgaggcggtcaggtttgccgggaagtatgcgggctattattctgagcttggtcgtttgtggcgggccgggaagatggcagatgcgcagtatgtgcgtttgtgtgtggagttggagcgtgccggccatgatggttcggcatcgttagccgccaggtttgtgtcggattttcgccggttgaatggtgtggatccgggtttgatcgtgtatgacgagtttgatgctgccgccgcgttggcgaggtcgttttcgactatgaagattcttgagagtgacccggatagggcgaaggacacgattgatgcgatggctgcgggttttgatcgggctgtgatgaatgctggtcgtgacacggttgagtggtctgcgggtgcgcagggtaggtcgtggcgcagggtgactgatggtgatccgtgcgcgttttgtgccatgttggctacgaggtcggattatacgaccaaagagcgggcgcttactacgggtcatactcggcgtcataagcgtggtcgtaagcgcccgtttggttcgaagtatcatgatcattgtggttgtacggtggttgaggttgttggaccttgggaaccaaatagggctgatgccgcatatcagcgggtttatgagaaggctcgtgagtgggttgatgatcatgggttgcagcagtcgcctggcaatattttgaaggctatgcgtactgttggcgacatgagatgatggtttccggttgtgtgccgccggttatcggtgcacgtggttgtctcccgcacgggggtcaacaatgttgtgttgttttccgcaaggagtgtaaggttaggctatggccgatcagagtgttgaagaacagaatgttgacaatgatgctgttgagcccggaatgggtggagacattgttgatgttgtgaaggatgggcaggctgccggcgatgatcatgccggtgatgtttccgtgacgggtgaggcttctgggctgtctggcacggattggaaggctgaggcccgtaagtgggagtctcgtgctaaaagtaatttcgccgagttggagaagcttcgcgcctcggatagtgattcggggtctactattgatgagcttcgccgcaagaatgaggaactcgaagaccggatcaacgggtttgttcttgagggtgtgaagcgcgaggtggctgccgagtgtggcctgtcgggtgacgcgatcgcttttcttcacggtagcgataaggagtcgcttgccgagtctgctaaggctttgaagggtttgatcgaccatagtagtggtggtggcgcgggtgtgcgccgtcttgcggggagtgcccccgttgatgatgttaaacgacgtgagggtgtcgcgtttgtggatgctcttgtcaataattctaggagatgatttgtgatggctgacgattttctttctgcagggaagcttgagcttcctggttctatgattggtgcggttcgtgaccgtgctatcgattctggtgttttggcgaagctttcgccggagcagccgactatttttggccctgttaagggtgccgtttttagtggtgttcctcgcgctaagattgttggtgagggtgaggttaagccttccgcgtctgttgatgtttcggcgtttactgcgcagcctatcaaggttgtgactcagcagcgtgtctcggacgagtttatgtgggctgatgctgattaccgcctgggtgtgcttcaggatctgatttcgcctgccctgggtgcttcgattggtcgcgccgtggatctgattgctttccacggtattgatcctgccactgggaagcctgctgcggctgtcaaggtgtcgctggataagacgacgcatgttgttgatgccacggattctgctacgaccgatcttgttaaggctgtcggtcttatcgctggtgctggtttgcaggttcctaacggtgttgctttggatccggcgttctcgtttgctctgtcgactgaggtgtatccgaaggggtctccgcttgccggtcagcctatgtatcctgccgccgggtttgccggtttggataattggcgcggcctgaatgttggtgcttcttcgactgtttctggcgccccggagatgtcgcctgcctctggtgttaaggctattgtgggtgatttctctcgtgttcattggggtttccagcgtaacttcccgatcgagcttatcgagtatggtgacccgggtcagactgggcgtgacctgaagggccataatgaggttatggttcgtgccgaggctgtcctgtatgtggctatcgagtcgcttgattcgtttgctgttgtgaaggagaaggctgccccgaagcctaatccgccggccgagaactgatttattgttgcggtgatgtgtcaatgtgcagggggtggtgttgatgggtatcattttgaagcctgaggatattgagcctttcgccgatattcctagagagaagcttgaggcgatgatcgccgacgtggaggctgtggctatcagtgtcgccccctgtatcgctaaaccggatttcaaatacaaggatgccgctaaggctattctgcgcagggctttgttgcgctggaatgatactggcgtgtcgggtcaggtgcagtatgagtctgcgggtcctttcgctcagactacacggtctaatactcccacgaatttgttgtggccttctgagattgccgcgttgaagaagttgtgtgagggtgatggtggggctggtaaagcgttcaccattacaccgaccatgaggagtagtgtgaatcattctgaggtgtgttccacggtgtggggtgagggttgctcgtgcggatctgatattaacggctacgctggccctttgtgggagatatgatatgaccagttttccttatggtgaaacggttgtgatgcttcaaccgactgttcgtgtcgatgatcttggcgacaaggttgaggattgggggcatcctgtagaaaccgtgtaccataacgtggccatctatgcttccgtttcgcaggaggatgaggccgcggggcgtgactctgactatgagcattggtcgatgcttttcaagcagtctgttgttggtgctgattatcgttgtaggtggcgtattcggggtgttgtgtgggaggctgacgggtctcctatcgtgtggcatcatccgatgtccggttgggatgcgggtacgcagatcaatgtgaagcgtaagaagggctgatgggttgtggctcaggatgtgaatgtgaagctgaacttgccgggtattcgtgaagtgttgaagtcttctggggtgcagggcatgttggctgagcgtggcgagcgtgtcaagcgtgcagcctcggcgaatgtgggcggtaacgctttcgataaggcccaataccgtaatggtttgtcgtcagaggtgcaggttcacagggttgaggctgtcgccaggactggtaccacatataagggtgggaagcgtattgaggcgaagcatggcacgctggctcgttcgattggggctgcgtcgtgatcgtctacgatgaccccaggaagtgggctaaacgcgtgcttaaggatgatggctggctgtctgggataccgtgtacagggacggtgcctgaccggtttgagggtgacctgatttggttggcgttggatggtggcccgcagttgcatgtgcgcgagcaggtgtttttgcgggtgtacgtgttttcggatactccggataaggctatgtctttgtcgcgtcgtgttgaggctgtgctggctgacggtgtggacggtgaccctgtggtgtactgtaaacggtctactggccctgatttgctggttgatggtgcacgttttgatgtgtattcgctttttgagctgatatgtcggcctgcggagtctgaataagcttattgtttttgttttaatgtaattgtttgatatttaatgggggttgtgatggctgcaacacgtaaagcgtttaatgttcgctctgctgttactggcgatgtttatattggtgacgcgcacgcgggtgatactattaagggtgtggaggcggttcctgatggtcttaccgctttagggtatctgtctgatgatgggtttaagattaagcctgagcgtaaaacggatgatttgaaggcttggcagaatgcggatgttgttcgtactgtggctacggagtcgtctttcgagatttctttccagttgatcgagtctaagaaggaggttatcgagctgttttggcagtcgaaggttactgccggatccgattcgggttcgtttgatatttctcctggggctacgacgggtgttcatgccttgttgatggatattgtggatggcgatcaggttattcgctactatttccctgaggttgagttgatcgatcgtgacgagattaagggtaagaatggcgaggtgtatgggtatggtgtgacgttgaaggcgtatcctgcccagattaataagaagggtgatgcggtgtctggtcgggggtggatgacggctttaaaagctgatactcctccgactcctcctccggccccggttcctccgaagcctgagccgggtccgaatccgccgtccgataactgatacacgattttaggggattgttgatagatgagtgacacaggttacacgttgaagattggtgaccgtagctgggtgttggcggatgcggaggagacggctcaggctgttcctgcccgcgttttccgtcgtgccgccaggattgcccagtcgggggagtctgcggatttcgcccaggttgaggtgatgttttctatgttggaggctgccgccccagaggatgctgtggaggctttggaggggcttcctatggttcgtgtggccgagattttccgtgagtggatggaatataagcctgacggtaagggtccctcgctgggggaatagtttggctccacggcctgattgatgattatcgtggggccatcgaatacgatttccgcaccaagtttggtgtttctgtttatagtgttggtggcccgcagatgtgttggggtgaggctgtccggctggctggcgtgttgtgtaccgatacgtctagccagttggcggcccacctgaatggttggcagcgcccgtttgagtggtgcgagtgggctgtgatggacatgctggatcattacaggtctgctaatagtgaggggcagccggagcctgtggcgaggcctacggatgagcgtagggcccggtttacgtctgggcaggtggacgatattttggcgcgtgttcgtgccggtggcggggtgtctcgcgagattaatattatggggtgaatagtgtatgtctggtgagattgcttccgcatatgtgtcgttgtatacgaagatgcctggccttaaaagtgatgttggtaaacagctttctggggtgatgcctgcggagggtcagcgttcgggtagcttgtttgctaagggcatgaagttggcgcttggtggtgccgcgatggcgggtgccatcaatgttgctaagaagggcctcaagtcgatttatgatgtgactattggtggcggtattgctagggcgatggctattgatgaggctcaggctaagttgactggtttgggtcacacgtcgtctgacacgtcttcgattatgatttcggctattgaggctgtgactggtacgtcgtatgcgttgggtgatgcggcttcgacggctgcggcgttgtctgcttcgggtgtgcagtctggcgggcagatgacggatgtgttgaagactatcgccgatgtgtctcatatttcgggtaagtcgtttcaggatacgggcgctatttttacgtctgtgatggctcgcggtaagttgcagggcgatgacatgttgcagcttacgatggcgggtgttcctgtactgtctttgcttgcaaggcagacgggtaaaacctcggctgaggtgtcgcagatggtgtcgaaggggcagattgattttgccacgtttgcggctgcgatgaagcttggcatgggtggtgctgcgcaggcgtctggtaagacgtttgagggcgctatgaagaatgttaagggcgccctgggttatcttggtgctacggctatggcgccgtttcttaacggcctgcggcagatttttgttgcgttgaatccggttatcaagtcggtgacggattctgtgaagccgatgtttgctgccgtagatgctggtattcagcgtatgatgccgtctattttggcgtggattaatcgtatgccgggcatgatcactcgaatgaatgcacagatgcgcgccaaggttgagcggttgaagggcatttttgcgagaatgcatttacctgtccctaaagtgaatttgggtgccatgtttgctggcggcaccgcagtgtttggtattgttgctgccggtgtggggaagcttgttgcagggtttgccccgttggcggtgtcgttgaagaatctactgccgtcgtttggtgctttgaagggtgccgctggcgggcttggcggcgtgtttcgcgccctgggtggccctgtcggtattgtgatcgggctgtttgcggcaatgtttgccacgaacgcccagttccgtgccgcggtgatgcagcttgtggctgtggttggccaggctttggggcagattatggccgctgtgcagcctgtgtttggtctaattgctggtttggtggcacggttggcgccagtgttcggccagattatcggtatggttgccgggctagcggcgcagctggtgcctgtgattagtatgcttgtcgcccggctggttcctgttatcacgcagattattggtgcggtgacacaggttgctgccatgttgttgccggcgttgatgccggttattcaggctgttgttgctgtgatacggcaggttgttggtgttgtgtcgcagttggtgccggttttgatgcctgtgattcagcagattttgggtgctgtgatgtctgttctgccgcctgttattggtttgatccggtcgttgatgcctgtgattgcggcggttatgcgtgtggtggttcaggttgttgcggttgtgatacaggtggtggcccgtattcttgctgtggtggctccgatggtggcggctgtggtggggtttgttgcccgtattgttggtgctgtcgtgtcggctgtggcccgtgtgattgctgctgttgcccgtgtcgtctcatgggttgtggcccatttggtgtctggtgtggcgcatatgggttcggctatactgaatggctggaatcgtattagggcgtttacgtcagcgtttattaacggtttcaagtcgattgtttccggcggtgtgaacgcggttgtggggttttttgcccggcttggttcttcggttgcctcccatgtgaggtctggttttaacgcggctcgtggcggtgtttcttctgcgatgaatgctatccggagtgttgtgtcttcggtggcgtccgctgttggcggatttttcgggtcgatggcttctcgggttcgtggtgctgcctcgtccgggtttaacgctgcgaggggtgcggcttcttctgctatgcacgctatgggctcggctgtgtctagtggtgtgcatggtgtgctagggtttttccggaatctgcctggcaatattcggcgtgcgcttggtaatatggggtccctgttggtgtctgctggccataatgttgttgccggtttgggtaacggtattaagaatgctatgagtggcctgctggatacggtgcgtaatatgggttctcaggttgctaatgcggcgaagtcggtgttgggtattcattctccgtcgagggtgtttcgtgacgaggttggtcggcaggttgttgccggtttggctgagggtattactggtaatgctggtttggcgttggatgcgatgtcgggtgtggctggtcggcttccggatgcggttgatgcccggtttggtgtgcgatcttcggtaggctcgtttaccccgtatggcaggtatcagcgtatgaatgataagagtgttgtggtgaatgtgaacggacccacgtatggggatccgaacgagtttgcgaagcggattgagcggcagcagcgtgacgctttgaatgcgttggcttacatgtgataggggggtgttgttcatgtttattcctgacccgtctgatcgttctggtttgactgttacctggtttatggatccgctgtacggtgaggagcgtgtgcttcatttgacggattatacgggtgcgtctccggtcatgttgttgaatgattcgttgcgcggtttgggtgttcctgaggttgagcatttttctcaaactcatgttggtgtgcacggctcggagtggcgcgggtttaatgtgaagcctcgcgaggtgacattaccggtgttggtgtcgggtgttgacccggatccggtgggcgggtttcgtgacggttttttgaaagcctatgacgagttgtggtctgcgtttcctcctggggaggagggggagttgtcggtgaagactcctgccggttgtgagcgtgtgttgaagtgtcggtttgattcggtggatgacacgtttacggtggatccggtgaatcgcggctatgcccgctatgtgcttcatttgacagcttatgaccccttttggtatggggatgagcagaagtttcgtttcagtaacgcgaagttgcaggattggttgggtggcggccctgttaataagaagggtacagcgtttcctgttgtgttgacaccgggtgtgggctcgggctgggataacctgtctaataagggtgatgtgcctgcgtggcctgtgattcgtgtcgaggggcctttggagtcgtggtctgtggagattgatggtttgcgtgtgtcttcggactatccggtggaggagtttgattggatcactattgatacggatcctcgtaaacagtctgcgttgttgaatgggtttgaggatgtgatggatcgtttgaaggagtgggagtttgcgcctatcccgcctggcggttctcggagtgtgaatattgagatggttggtttgggtgccattgttgtgtcggtgcagtacaggtttttaagggcttggtgaatagttgatggctggtcttgttccgcatgtaacattgtttacgccggattatcatcgtgtggcgcctatcaatttttttgagtcgttgaagttgtcgttgaagtggaatggtttgtctacgctggagttggtggtgtcgggtgatcattctaggcttgacgggttgactaggccgggtgcacggctggttgttgattatggtggtggccagattttttctgggcctgtgcgtaaggttcatggtgtgggtccgtggcgttcttcgcgggtgaccatcacgtgtgaggatgatatccgcctgttgtggcgtatgttgatgtggcctgtgaattatcgtcctggcatggttggtatggagtggcgtgccgacagggattatgcccactattcgggtgcggcggagtcggtggctaagcaggtgttgggggataatgcttggcgttttccgcctggtttgtttatgaccgatgatgagagtcgtggccgctatattaaggattttcaggtgcggtttcacgtgtttgcagacaagttgttgccggtgttgtcgtgggctcggatgactgtcacggtgaagcagtttgaggatgtgaagctggatcggcgtggtttggtgtttgattgtgtgccggctgtgacccgtagtcatgtgttgactgccgagtctggttcgattgtgtcgtgggagtatgtgcgtgacgccccgaaggctacttcggtggtggttggtggccgcggcgagggtaaggataggctgttttgtgctg

SEQ ID NO: 45 - DNA, 4579 bp, Pahexavirus sp.
  source 1..4579: mol_type = genomic DNA
gatccggagtatccgaaaacacattcaccctgagaaacacccgctcacgaacatgcaactccgggccaccatcaagagccaaccaaatcaaatcacccgtaaaatcatcgggcaccgtccccgtacacggtatatcagacagccagccatcatcctcgagcacacgtttagcccatactcttgggtcaccgtagacgatcacgacgcagccccaatcgacctcgccaacgtgccatgcttcgcctcaatccttttgccacccttatatgtggtgccaatcctagccacagcctcaacacggtgaacctgcacctcagacgacaaccctgcacgatactgggccctatcgaacgcgttaccgcctacattcgctgatgcggcacgccgcacctgctcgccacgctcagccaacatgccctgcacacccggcgcttttagcacctcacggataccaggaagattaagcttcacatcaacatcacgtgccacaaccatcagcccttcttgcgcttcacaggaatctgcgtaccagcatcccagccagacatggggtgatgccacatcataggagacccgacagcctcccacacaacaccccgaatacgccaacgacaccgataaccggcacccttgacaggctgcttgaaaagcagtgtccaatgctcccaatccgtgtcacggccggcagcctcatcctcctgcgacagggaagcataaacagccacgttatggtatacggtttctacaggatggccccaatcctcaaccttgtcgccaagatcatcgacacgaacagtcggttgaagcatcacaaccgtttcaccgtaaggaaaactggtcatatcatatctcccacaaagggccagcgtagccgttaatattcgacccgcacgagcaaccctcaccccacaccgtggaacacacctcagaatgattcacactactcctcatggtcggtgtaatagtgaacgctttaccagccccaccatcaccctcacacaacttcttcaacgcagcaatctcagaaggccacaacaaattagtgggagtattagaccgtgtcgtctgggcgaaaggacccgcagactcatactgcacctgacccgacacgccagtatcattccagcgcagcaaagccctacgcagaatagccttagcggcatccttgtatgtgaaatccggtttagcgatacagggggcgacactgacagccacagcctccacatcggcaatcatcgcctcaagcttctctttaggaatatcggcgaaaggctcaatatcctcaggcttcaaaatgatacccatcaacaccaccccctgcacatagtacacattcgcttatcttgtatcagttaccagccggaggattaggatcaggcttcggggctggaggaggagtcggtgcagccttctccttcacaacagcaaacgaatcaagcgactcaatcgcaacatacaggacagcctcggcacgaaccataacctcattatggcccttcaaatcgcggccagtctgatccggatcgccatactcgatcagctcgatcgggaagttacgctggaaaccccaatgaacacgagagaaatcacccacaatagccttaacaccagagacaggcgacatctccggggcacccgaaacagtcgaagaagcaccaacattcagaccacgccaattatccaaaccagcaaaaccagcggcaggatacatcggctgaccggcaagcggcgaccccttcggatacacctcagtagacagcgcaaacgaaaacgccggatccaaagcaacaccgttaggaacctgcaaaccagccccagcaatcaggccgacagccttaacaagatcagccgtagcggaatccgtggcatcaaccgtcttcgacgtcttatccagcgacaccttcacagccgtggcaggcttacccgtagccagatcaacaccatggaaagcaatcagatccacagcgcgaccaatagaagcgcccagagccggcgaaatcagatcctgcagtacacccagacggtaatcggcgtcagcccacataaactcgtccgagacacgctgctgagtcacaaccttgatcggctgggcagtaaacgcggaaacatcaacgctagcggaaggcttagtttcgccctcgccaacaatcttagcgcgaggaacaccgctaaacacggcacccttcacaggcccgaaaatagtcggctgctccggcgacagcttcgccaaaacaccagaatcgatagcacgatcacgcaccgcaccaatcatagagccaggaagctcaagcttacctgcagaaagaaaatcgtcagccatcacaaatcatctcctagaattattgacaagagcatccacgaacgcgacaccctcacgtcgtttaacatcatccacgggggcactccccgcaagacggcgcacaccagcgccaccactaccactatggtcaatcagccccttgagggctttagcagattcggcaagcgactcgcgatcaccgccagacagaaaagctacagcatcagccgagagaccatactcggtggccacctcacgcttaacaccctccaaaaccagctcactcagccgactctcaagttcctcatttttacgacgaagaccatcaatcatagattccgaattatcatcggtggagcgaagcttctctagctcagcaaaattgcttttagcacgagactcccacttacgagcctccgccttccaatcagtcccagacgatttaccctcgccttcactcttcgactgatcttcaacctgtttgccttgatcgcccttcaccgtgtcaacaatgccgtcaccctttccgggctccacagcatcattgtcaacattctgttcctcaacactctgatcggccatagcctaacctacactccttgcggaaaacaacacaacattgttgacccccgtgcgggagacaaccctgtgcaacgataaccggcggcacacaaccggaaaccatcatctcatgtcgccaacagtacgcatagccttcaaaatattgccaggcgactgctgcaacccatgatcatcaacccactcacgagccttctcatacgtcctctgataccctgcatccgccttattaggttcccaagggccaacaacctcaaccaccgtacaaccacaatgatcatgatacttcgaaccaaacggacgcctaccggcacgcttatgacgccgcgtatgaccagtagtaagcgcccgctctttggtcgtataatccgacctcgtagccaacatggcacaaaacgcgcacggatcaccatcagtcaccctgcgccacgacctaccctgcgcgcccgcagaccactcaaccgtgtcacggccagcattcatgacagcccgattaacacccgcagccatcgcatcaatcgtgtcattcgccctatccgggtcactctcaagaatcttcatagtcgaaaacgacctagccaacgcggcggcagcatcaaactcgtcatacacgatcaaacccggatccacaccattcaaccggcgaaaatccgacacaaacctggcagccaacgatgccgaaccatcatggccggcacgctccaactccacacacaaacgcacatactgcgtgtcattcatcttcccagaacgccacaaacgacccgactcagaataatagcccgcatacttaccggcaaacctaatggcttgccgctgatactccgtggccgcaaacctcgactgaacaccggaagccatagcctattagacctcgttcgtctgccgagcaaaagccccagccaatgcagccaacgggtcacccgactcacgccgatgctccacaatcgcattcacttgaccatcatcaaggccaagcatctccaacaccgtccgagaatccgccggaagaataccggcaccaacaagcttcgtcacagcatcagccgtagccgccctggtaggcgtcgacgcatcacgccaacgcaaaccaacatcaccaaaaaacgcggcctcatcaacactcgaatccaacgcccgggcagccaggaaaccaaccgacagccagccctgaccaaacgacgtctgcctgcgttcagcacgcttcacaagccgagactcctcggcagccaaagcctccccactaggcgggttagacgtgataaacccgaaatagcgttccggaacagccgcctcacccgcagtcaactgcgccaacagtctcatctgatccgaatacggtgtaggcgaattgacaggaaacgaccccacattcggagtgtcaccatcatcatccttatccacagcccacacagaagccatcgacaggacccagccaggctgcgaaaactcgtcagccgacacgccagtcacccaacgctgaggataggcataaaaatcacgattcacagactgccccaacagtgtgcgcacagcctcatccgtgtaagccctaatagacctcgtaatctccgaacggccatcaatcctagaagtacggcgacgattcacaataggcaccaacggaaccgcaccaagaccattcacgatacggcccgtctcaacccactcacgcgaaccccgccgctccacctgaacaat

SEQ ID NO: 46 - DNA, 7617 bp, Pahexavirus sp.
  source 1..7617: mol_type = genomic DNA
cagatgtgtataagagacagcagcaactgttggcgacactggtgttgtcgtctaacgggttgcagcagcagctggataggcgtgctgtggcggctcgtgtggcgtttggtgagtctgcagcctgtgatcctacccctgtggagggtgaccgtgtgatggttccttctggggctgtgtgggctaaccatgccggcgagtggatgctactgtctccgaggattgagacgggcactaagcagatcatgtttggcgggtctgctgtgtatgcttacacgatcccgtttgctcgcccgtttggtagtgcgcctgtcgtggtggcgtctatggctacggcggctgggggcacggcacagattgatgtgaaagcatacaatatcactaccaaggattttagtttggcgtttattacgaatgatggttctaagccgaatggtgtgcctgcgatagctaactggattgctgtcggcgtgtgactgcacgagtgttgtggcggatggtgtgatgttggggggctgtggtgtcgtggtttactcctgcactggtggcctccatttgtaccgcgttggccacggttttgggttctgttcaggctatcacatcccggtctaggaagcgtttacgcaggctgtctgcgcaggtggatgcgatggaagagtatacgtggggtgtgcggcgcgaggtgcgaaggtttaacgccgggcttcctgatgatgtggagccgatgcatcttcctgatttgcctgagtttttgaaggatactgttgatggtggaggtgagtagggtggagggagttggaggaagaaaaaaggcagcgccgcaattttgagaaggcttccctgatactgttgttcctgtcgcttgtgttgttggcggtggttgccgggggtgcttggcggtacgggtctgtggcttcgcaaagggattcggagcaggctagggcccagtcgaatggtacagccgctaaagggttggccagccgtgtgaagcaggcgtgtgcttcgggtggggtggagtctgcgcggcttcaccagtctggcttgtgtgtggatgctcagcgtgttgagcgtagcgtgcagggtgttcctggcccggctggtgagcgcggcccgcaagggcccgctggtgttgacggtcgggatggtgttaatggttcggctgggctggttggccctgttggtccgcagggttctcctggcttgaatggtgtgaaaggtcctgacgggttgcctggtgctaacggttcggatggccatgatggtgttccgggccgtgcaggtgctgacggtgtggacggcgttgatggtcgggatggctctgctggtgagcgcggtgatccgggtccttcgggtcctgccggagcccagggtgtgcagggtgaacgtggagagcgtggccccgccggtgagaacggatccgatggtaaagatggtaaggatggccgctcggtggtgtctgtgtactgttctgatggtcgtctggttgtgaaatatagtgacggtacggcctctaccatagcgggttcggtggcctgccagggtgtgaaaccgtcaccggtggttaccgtatcatcccacaagtaaaagaggaagggtgttactagtgttgatagtagtgtttgggggtggcgtgttgtgagatacattcctgcagcgcatcactcggccggatcaaataagccggtgaaccgtgttgtgattcacgcgacatgcccggatgtggggtttccgtctgcctctcgtaaaggacgggctgtgtccacggcaaactattttgcttccccatcgtctggtggttcggctcattatgtgtgtgatattggggtgactgtgcagtgcttgtcggagtctacgattgggtggcatgccccgccgaatccgcatagtttgggtatagagatttgcgccgatgggggttcgcacgcctcgttccgggtgccagggcatgcctacactcgggaacagtggctgtccccgcaggtgtggccagcagtagagaaagctgctgtgctgtgccgacaattgtgtgacaagcatggtgttccgaaaaggaaactgtctgtggccgatctaaaagcgggtaggcggggtgtgtgcgggcatactgatgtgacggatgcgtggcatcagtcggatcatgacgatccggggccgtggtttccgtgggacaggtttatggccgtagtcaacggaggcagtggagagagtgaggagttaacggtggctgatgtacaagcgttacataatcagattaaacaattgtctgctcagcttagtggttcggtgaataagctgcatcatgatgtgggtgtggttcaggttcagaatggtgatttgggtaagcgtgttgatgccttgtcgtgggtgaagaatccggtgacggggaagctgtggcgcactaaggatgccctgtggagtgtctggtattacgtgttggagtgtcgtagccgtattgacaggcttgagtctgctgttaacggtttgaaaaagtgatggtggtttgttgtgggtaaacagttttggttaggtttactggagcgggcggctaagacttttgttcaaacgtttgttgctgtgcttggtgtgacggcgggtgtcacgtatactgcggagtcgtttcgcggtttgctgtgggagtctgccctgataacagcaacggtggctgcggtgttgtcggttgctacatcgtttggtagcccgtcgtttgtggccggcaaacctaaaaccacggttgtggatgctgggcttgttccacccgatgacgggggtatggttgagccgcactcggtggatgtgtcggatcctggcatgatcgagccgatggatgatgcggatgttgccggctatgtgccgaggcgtgcagccgagtctgaggttggcacggtagagtctactgttgcataattgaatatgtgtgtgccccagcggtgctgccacgattgtgtggtggttgccgctggggcactctttttgtttatgcggtgtggctatgattcgtttctgtcgatggtgtcttcgagcatctgatacaggtggaggcaggtagagatagtttcgctggcctggtctagaacgttccggccgataacatttttgtggttgtcgcggtggcggatgatagcccacatgatctcgtcggctgccgcctgcaatagttttgcctggtatgcgatcccggcgagccaatctatggcttccgggcttgcctgtatgtcgtctggcatgtcactattttttctgttgtttgtggggtgtcctgcactgtcgcataaccacaagatttcgctgcactcgtctagcgtgtcctggtcgatagcaagatcgtcgaggctgacgtcgttgacggtaaggttcacgttgtcgagggagatgggtacaccgtactgtttttcgacactgtcaacaatgttttccagctgttgcatgttggtgggctgttgttggacgatgcggtgtatcgctgtgttgagggtggtgtaggtgatattgtgtgtgttgttcatcgtgttatgccattccttcgttatcgtctggcatgtagtatgtgctgtttgcgtactcggttaacgtcatcagtgtttggtctgcccactgtttcacagtctgccgggggacaccaaatcgtttggccgctgtggcgtaggtttgatcgtatccgtagacttcccggaatgctgccagccgtgctaaatgtttccgctgtttggagggttcacaggcgaggatgtagtcgtcgatggctagctgtagatcgatcatggagacgatgttgttgccgtggtgttgtggcgcggttggtgggggtggcatgcccggttcgacgctcggtttccatgggccgccgttccagatccattgcgcggcttggataatgtcggctgtggtgtaggttcgggtcactggtcatcccctgaacaggttgtcgaggttgtctgggttgctggtgctggtggtgtcgaatcgtcccacgcagtggcagtagtcgtacatgagtttaataatgtgttggtggtcgccgaggtaggtgtttccgctgatgctgtaggtggctgtgccgtctttgctgatggtgtatttggcggtgatggtttcgggtgtttcggtgttggtgatgatggctgcggtggtggagcctactgtttgtagcctggtggtttgggttccgtcgtcgaggatggtggtgaccatgatgattctccttaaatgctggtttggttgtcggctagatgaatgatatcgggtaaaggtttcggctggtctaaatgttgtgtggttttgttggctagccgtttggctaccctgtagcacattttggtgtagtgtttgttgtctaggttgtggtattgttcccgcaccgcaatatatagtagggagtcttggtacaggtcgtctgcactgattgcggggtagtgtccggccgttttggtgcatgcccggttgagtgtgcgtagatgatggtctgtggcccacacccacgatgcggtggtggctaggtctgcttttgttggtcgtctgctcatggcactattacctggctatctggtagttgtttggtgttttgttgttgatagtgtagcacacgagtccggggtttccggtggtgcccgccttgtgtcggtaccagactgattctccttccatggatgggcattggatgaaggtgcgttgtccttgctcggagatttctaggtggtgtcggtgcccggccatgagtatgtgggatgtggtgccgttgtggaattcttggccgcgccaccattcgtagtgttggttgttgcgccattggtgtccgtgggcgtgcaggattcgggttcctgccacgtcgacggtggtggtcatttcgtcccggctggggaagtggaagtgtaggttgggatattggttgttgagttggtaggcttctgcgatggcccggcagcagtccacgtcgaaggagtcatcgtaggtggtgacgcctttgccgaatcgtactgcttctccgtggttgccggggatggatgtgactgtcacgttttggcagtggtcgaacatgtggacgagttgcatcatggccatgcgggtgagcctgatttgttccgtcaagggtgtttgtgttcgccaggcgttgttgcctccttgtgacacgtatccttcgatcatgtcgccgaggaaggcgatgtggactcgttgcggtttgcctgcctgttgccagtagtgttttgcagcggtgagggagcgcaaatagtcgtcggcgaatcggctggtttctccgccggggatgcctttgcctatttggaagtcgcctgccccgataacgaatgcggttttactgtctgttgtggtggtgtctattgtgggtggctgccagtcggctagcttagctacgagttcgtctacagggtaggggtttgttgcgggttggtggtcgattattttttgtatggatcggcctgtttctccgttggggagtgtccattcggagatgcgtgtgcggcgtacggtgccgtttgcgagattgtcgtcgaaggtgtcgaaggcgttgtcgtggttggctagctgtgtgagtagccggtctatattgtctatcactgggtatcctcctcttctgtttgtggggtgttggcttgtttgcggcgatagtctttaataacggtggcggatatggggtatccggcttgggtgagctgttttgctagccatgaggcggggatagttttgtcggcgagcacttcggcagccttgttgccgtagcgttggatgagggtttcagttttggttgccatgatgtcctaggggttgtgtggtgggctgccatcctgtgcggcagtcgccgtcgtgtcctggtttgcgtgtgcaccacgatacggttccgtctgtgtggttgagtgttttgccgcacaggacgttttgtagatgctccagcagtgcggcgtcaccctggttgctggtttgtgtgtcgaagagtgttttctggttggtgaaatgctctgatacggtgccgttgtggactgggagtatccatgttttccattgttgttgtagccgggtgttccagtggaattgtttggccgcgttcatggcttgtttagcggttttgtagtagccgactagtatgcgctgatgttcactgtcggttggattttggcctcgccagtattgcgctgcgacggcgtaccggttgctggctgtgaaggcgtcccagcagtattcgataatgtgctggagcacattatcgggcatgtctcgtacttggttttcgtcgagccacgcgtcgacaatgatgttgcgtatggcttgcttgtctctggtggtgggtttgaacgagatgctcacaatgctggcctgtcgtcttgcatgaactggttgaaggtgttgttcccggcgtgttgggcttgtgtgatttgctggtcggtccagtctggatgttgctgtttcagataataccagtggcacgcattgtaggtttcgttttgtagccgggtgagatggttttcggtgatgatttgtttccacatggcccatgacacgtcgagccggtcaagaatttcgagggctgggatgttgaactggtcgaggaacaggatttcgtgggtgtagtagtttttctcgtaggcgtcccatccgcttcggtgcctgttgggctggtttttggggtaggcttcccggcagattttgtgtaaacgtttggccatgtcgtcgggtagtttaatgtcggggttggcgcggatcatggatcgcatcccatcataggtggtgccccaggtgcgcatgatgtaggtggggtcttcaccatcagcccatttttctgcacagatggcgaggcggatacgcctcctggctatttggctggtgttgcggcggtgggggatggggcacgtgtcgaggggatccatgatgttttagtgtacctttctggtttcgtgttgttgacaggttttactgtagcacagtgtctagtgcttgtgtcaaccctgtttttccagcctgaaggtaggtgtctgtaacatccccgagggtgaggggcacatggatggcttgggggagtgctgcctggagggtttgggccatcttgtctcctgccgggtctgggtcggaccagatgtaggtgtggtcgtagccttcaaaaaatttggtccaaaaagtttgccacgaagttgcgccgggtagggcgacggccgaccatccgcattgttcgaggatcatggagtcgaattcgccttcgcaaatgtgcatttcggatgccgggttggccatggcggccatgttgtagatggagcctgtgtctccggctggggttaggtatttggggtggttgtgttctttacaatcgtgtgggagtgagcagcggaaacgcatttttcgtatttcggctggcttgccccacacggggtacatgtaggggatggtgatgcactggttgtagttttcgtggcctggaatggggtcattgtcgatgtatccaaggtggtggtagcgggctgtttcttcgctgacgcctcgcgctgagagcaggtcgagtatgttttcgaggtgggtttcgtagagggccgatgctttctggattcggcggcgttccgcaatgttgtatgggcgtatactgtcgtacattcgggttttcttcttctaatcgttgttgttgcc

SEQ ID NO: 47 - DNA, 10896 bp, Pahexavirus sp.
  source 1..10896: mol_type = genomic DNA
cccttcaaagcaccaaaagacggcagtagattcttcaacgcaaccgccagcggggcaaaccctgcaacaagcttcccgacacccgcagcaacaataccaaacactgcggtgccacccgcaaacatggcacccaaattcactttagggacaggcaaatgcaaccttgcaaaaatgcccttcagctgctccaccttggcgcgcatctgtgcattcattctcgtaatcatgcccggcatacgattaatccacgccaaaatagacggcatcatacgctgaataccagcatcgacggcagcaaacatcggcttcaccgaatccgtcaccgacttgataaccggattcaaagcaacaaaaatctgccgcaggccgttaagaaacggcgccatagccgtagcaccaagataacccagggcgcccttaacattcttcatagcgccctcaaacgtcttaccagacgcctgcgcagcaccacccatgccaagcttcatcgcagccgcaaacgtggcaaaatcaatctgccccttcgacaccatctgcgacacctcagccgaggttttacccgtctgcctggcaagcaaagacagtacaggaacacccgccatcgtaagctgcaacatgtcatcgccctgcaacttaccgcgagccataaccgacgtaaaaatagcgcccgtatcctgaaacgacttacccgaaatataagacacatcggcgacagtcttcaacacatccgtcatctgcccaccagacttcacacccgaagcagacaacgccgcagcagtagaagccgcatcacccaacgcatacgacgtaccagtcacagcctcaatagccgaattcataatcgaagacgtatcagaagacgtatgacccaaaccagacaacttagcctgagcctcatcaatagccatcgccctagcaataccgccaccaatagtcacgtcatagatagacttcaaacccttcttggcaacattgatggcacccaccattgcggcgccaccaagcgccaacttcatgcccttagcaaacaagctacccgaacgctgaccctcagcaggcataaccccggaaagctgtttaccaacatccgccttcaaacccggcatcttcgtatacaacgacacatatgcggaagcaatctcaccagacatacactattcaccccataatattaatctcgcgagacaccccgccaccggcacgaacacgcgccaaaatatcgtccacctgccaagacgtaaaccgggccctacgctcatccgtaggcctcgccacaggctccggctgcccctcactattagcagacctgtaatgatccagcatatccaacacagcccactcgcaccactcaaacgggcgctgccaaccattcaggtgggccgccaactggctagacgtatcggtacacaacacgccagccagccggacagcctcaccccaacacatctgcgggccaccaacactataaacagaaacaccaaacttggtgcggaaatcgtattcgatggccccacgataatcatcaatcaggccgtggagccaaactattcccccagcgaggcacccttaccgtcaggcttatattccatccactcacggaaaatctcggccacacggaccataggaagcccctccaaagcctccacagcatcctctggggcggcagcctccaacatggaaaacatcacctcaacctgggcgaaatcagcagactccccagactgggcaatcttggcagcacggcgaaaaacacgggcaggaacagcctgcgccgtctcctccgcatcagccaacacccaactgcggtcaccaatctttaacgtgtaacccgtgtcactcatctatcaacaatccctcaaaaatatgtatcagttatcggacggcggattcggatccggctcaggcttaggcggcgtaggaggctccggcttcggagccggaggaggagtcggaggagtatcagcttttaaagccgtcatccacccccgaccagacacggcatcacccttcttattaatctgggcaggatacgccttcaacgtcacaccatacccatacacctcgccattcttacccttaatctcgtcacgatcgacaagctcaacctcagggaaatagtagcgaataacctgatcgccatcaacaatatccatcagtaaagcgtgcacgccagtggtggcaccaggagaaatatcaaacgaacccgaatcggctccggcagtaaccttcgactgccaaaacagctcgataacctccttcttagactcgatcagctggaaagaaatctcgatagaagactcggtagcaaccgtgcgaacaacatccgcattctgccaagccttcaaatcatccgttttacgctccggctcaatcttaaacccgtcatcagacaggtaccctaaagcggtaagaccgtcaggaaccgtcttcacaccatcaatagtgtcaccggcatgagctttaccaatatagacgtcacccgtaacagcagagcgaacattagacgctttacgtgttgcagccatcacaacccccattaaatatcaaacaattacattaaaacaaaaaacaataagcttattcagactcgacaggcctacatatcagctcaaaaagcgaatacacatcaaaacgtgcaccgtcaaccagcaaatcagggccagtagaccgtttacagtacaccaccggatcaccatcaaccccgtcagccagaacagcctcaacacgacgcgccaaagacatagcccgatcaggcgtatcagaaaacacattcacccgcaaaaaaacacgctcacgcacatgcaactgcgggccaccatccaacgccaaccaaatcaggtcacccgtaaaatcatcgggcaccgtcccaacacagggtatatcagacagccagccatcatccttgagcacgcgtttagcccacttcctggggtcatcgtagacgatcacgacgcagccccaatcgacctcgccaacgtgccatgcttagcctcaatccttttgccacccttatatgtggtgccaatcctagccacagcctcaacacggtgaacctgcacctcagacgacaaccctgcacgatactgggccctatcgaacgcgttaccgcctacattcgctgatgcggcacgccgcacctgctcgccacgctcagccaacatgccctgcacacccggcgcttttagcacctcacggataccaggaagattaagcttcacatcaacatcacgtgccacaaccatcagcccttcttacgcttcacattcacctgcgtgccagcatcccagccagtcatcggatgatgccacatcataggagacccgtcagcctcccacacaacaccccttatacgccaacgacaccgataaccagcatccttgacaagctgcttaaaaagcagtgtccaatgctcatagtcagagtcacggcctgccgcctcatcctcctgtgacacagaagaatagatggccacattatggtacacggtttctacaggatgaccccaatcctcaaccttgtcgccaagatcatcgacacgaacagtcggttgaagcatcacaaccgtttcaccataaggaaaactggtcatatcatatcccccacaaagggccatcgcagccgttaatattcgacccgcacgaacagccctcaccccacaccgtggaacacacctcagaatgattcacactactcctcatggtcggtgtaatagtgaacgctttaccagccccaccatcaccctcacacaacttcttcaacgcggcaatctcagaaggccacaacaaatttgtgggagtattagaccgtgtagtctgagcgaaaggacccgcagactcatactgcacctgacccgaaacgccagtatcattccagcgcaacaaagccctgcgcagaatagccttagcggcatccttgtatttgaaatccggtttagcgatacagggggcgacactgatagccacagcctccacatcggcgatcatcgcctcaagcttctctctaggaatatcggcgaaaggctcaatatcctcaggcttcaaaatgatacccatcaacaccaccccctgcacatacacatatcaccgctacaataaatcagttaccggccggaggattaggcttcggtgcagccttctccttcacgatagcaaacgaatccagagactcgatagccacatacaggacagcctcggcacgaaccataacctcattatggcccttcaaatcgcggccagtctgacccggatcaccatactcgatcagctcgatcgggaaattacgctgaaaaccccaatgaacacgagagaaatcaccaacaatagccttaacaccagaggcaggcgacatctccggggcacccgaaacagtcgaagaagcaccaacattcagcccacgccaattatccaaaccggcaaacccggcggcaggatacatcggctgacccgcaagcggagaccccttcggatacacctcagtagacagcgcaaacgaaaacgccggatccaaagcaacaccgttaggaacctgcaaaccagtcccagcaatcaggccgacagccttaacaagatcagccgtagcggaatccgtggcatcaaccgtcttcgacgtcttatccagcgacaccttcacagccgtggcaggcttacccgtagccggatcaacaccatggaaagcaatcagatccacagcgcgaccaatagaagcgcccagagccggcgaaatcagatcctgaagcacacccagacggtaatcggcgtcagcccacataaactcgtcagagacacgctgctgcgtcacaaccttaataggctgcgcagtaaacgcagaaacatcaacgctagcggaaggcttaacctcgccctcaccaacaatcttagcgcgaggaacaccactaaacacggcacccttaacagggccaaaaatagtcggctgctccggcgaaagcttcgccaaaacaccagaatcgatagcacggccacgaaccgcaccaatcatagaaccaggaagctcaagcttccctgcagaaagaaaatcgtcagccatcacaaatcatctcctagaattattgacaagagcatcaacaaaagcgacaccctcacgtcgtttaacatcatccacgggggcactccccgcaagacggcgcacacccgcaccgccactatggtcgatcaaacccttcaaagctttcgcagactcggcaagcgactccttatcgccacccgacaagaaagcgatcgcatcactggacaaaccatactctgaagccaccccgcgcttcacaccctcaagaacaaacccgttgatcctgtcttcgagttcctcattcttgcggcgaagctcatcaatagtagatccagaatcgccactcgaggtacgaagcttctccaactcggcaaaattacttttagcacgagactcccacttacgagcctccgccttccaatcagtcccagacgatttaccctcgccttcactcttcgactgatcttcaacctgtttgccttgatcgcccttcaccgtgtcaacaatgccgtcaccctttccgggctccacagcatcattgtcaacatcctgttcctcaacactctgatcggccatagcctaacctacactccttgcggaaaacaacacaacattgttgacccccgtgcgggagacaaccctgtgcaccgataaccggcggcacacaaccggaaaccatcatctcatgtcgcccacggtacgcatagccttcaaaatattgccaggcgactgctgcaacccatgatcatcaacccactcacgggccttctcatacgtcctctgatactcggcatcagccctatttggttcccaagggccaacaacctcaaccaccgtacacccgcaatgatcatgatacttcgaaccaagcggacgcttaccaccacgcttatgacgccgagtatgaccagtagtaagtgccctttccttagtcgtataatccgacctcgtagccaacattgcacaaaaagcacacggatcaccatcagtcacccgacgccacgacctaccctgcgcaccagcagaccactcaaccgtgtcacgaccagcattcatgacagcccgatcaaaacccgcagccatcgcatcaatcgtatcattcgccctatccgtgtcactctcaagaatcttcatagtcgaaaactacctagccaaagccgccgcagcatcaaactcgtcatacacaatcaaacccggatccacaccattcaaccggcgaaaatccgacacaaacctggcagccaacgaggccgaaccgtcatggccggcacgctccaactccacacacaaacgcacatactgcgtgtcactcatcttcccggcacgccacaaacgacccagctcggcataatacccagcgtatttcccggcaaacctgaccgcctcacgctgatactcagtcgccgcaagcctcgacacaacccccgaagccatcgcctatcaaacctcgttagtttgacgcgatatagccccagccagtgccgccaacggatcagacgactcagcacgatgacgcatcacagcctcaacctgcacatcatcaagccccaacatctccaacaccgtacgagaatcagcaggcaaaataccggcaccaacaagcttcgtcacagcatcagccgtagccgcccgagtcggggttgaagcatcacgccaacgcaaaccaacatcaccaaaaaaatcggcctcatcaacacgagaatccaacgccttggcagccaaaaaaccaaccgacagccagccctgaccaaacgacgtttgacgccgctcagcacgcttcacgagccgagattcctcggcagccaaagcctccccactaggtgggttagacgtgataaacccgaaatagcgttccggaacagccgcctcacccgcagtcaactgcgccaacagtctcatctgatccgaatacggtgtaggcgaattgacaggaaacgaccccacattcggagtgtcaccgtcatcatccttatccacagcccacacagaagccatcgacagaacccagccaggctgcgaaaactcatccgcgctcacgccagtcacccaacgctgaggatacgcataaaaatcacgattcacagactgccccaacagtgtgcgaacagcctcatccgtgtaagccctaatagacctcgtaatctccgaacggccatcaatcctagaagtacggcgacgattcacaacaggcaccaacggaaccgcacccaacacattcggtatacgacccgtctcaacccactcacggctaccccgccgctccacctgaacaatcacatcaggaagcaacaactccgcctcaacaacctcaggatcacacgtctgctgcaccacaaggccagcatccaaacgagacccatcggcagaaaaccggccagtacaattcttcggcgactgcggacgaacagaaacagtgccatcctcttgggggataacagccacaaacgacaacccaaaaatcagtgcatccaaatgcacatcacacgacgccgtagcaagccgattcgcagcatacacaccagccagaccgtagccgtcaccattagtccagccaagccaatccagacgctcctccaaagcatccacagctataccaggccacgacaccaccgtctgcacacgctgcaactccggaggaatagccacccccaaatcacgcacccggctagaaccctcatagtagccctcaatacggcaatgccacgaagacaacctttggatacgatcgtacatgccctcaatcagagccaactcatccgagttcataccacagacacccgcttcctaccagaccgttcacgccgcttcactttaactgttttcgcaccaagatacgccagcgacacagcctccaagggaacctcagaaccatccttaaacgaggaaccccaaccccacgcagagcctttcttcttctgcacagccgacctcacagcaatatccaacatgtcacggcgagaatcagcacgaggatgagaaacactcccggaacgaacaccctcaagaaacgcctgacaagcctccacataaacgccagtatcagcaaccaccacgccacggcccggaataccacgatccgtcaacgccttctgcaacaacaccgcaccagacccggcaaccatgatccggtcagtatcaccccaacgaaccgccaaccagtcagccaaccggcccacaccatcaacaatcgttcccgacagcccatcaataacctcaacatgaaccccagcatcagtccggccagcacccgccaaagcaacccgatccccagaacgagaaaacgagacaccaaacactttcccgccaaccagactcgcctcatccaccgcagactgagcccacttatccgcaggaatcacagacgtagcagactggccacgatcccaccagccaagccgctcccgagcaaacccggcagcagacatcgactcatgctcatcgcttacagtcccaaaattcaggcgacgacccaacgccggattcgtatcccccgccaacttccgccactgccgcgacacatcatccggatcagactcgtcaggaatcgaaaactccgtccacgcaatccttttaccaccagacaaagcctgcccgcgaagacgcaacaccacgctaccgtccgccaacggcccaggcggcgtaccaagaaaaatctgctgcggatcaccagacggggcagcacctactgtaggaagcaacgcctccaactgctcatccgacaactcctgagcctcatcacacaccaaatcatcaaccgtaaaaccgcgagccgaaccccggctacgggccacaaactcgaccgaaccccaacccggacagccacacttcttaccacccacacgacaatcaggatgatgcaacacaatcgactcctgaccattcgtcgcacgaatcgccttcaccatacgagccaaatccggatagcggcgctcattctcaaaaaacgaacgcaaacgcataaaagccttacgagccgacttcaactcgtgagccgtatgcaaaatacgacgaccctgaatagtcgccttaaacaactccacaatctccgaaatagcattcttgccattctggcgaggcacaaacaccccacacacacccgaagcaagacgaccccctgcacccaccgcaagccaatcatccaacacctgctgctgccacggatcaggcgtcagcccatactccctaccaagctccccagcatccccgcccgcagacaccgaatacgctgcagccacacgatgacgaggaacctgagaccccacaacctgagacacctaatcaggcccccttacgctccctataccgatcaatcatcgccacagccgacccgccgccacgcccaccagacgccacatccaccgaataccgatccaacatgcccataaacgccttcacatgcgcacgcaacgacgccaccatctccgcacgcccctcacgccacaccacatcatgaatcaccgcagcatcaaggagaaacagccactcctcatcagacacgtactgcgcgcgactatcctcaccccacacacgccaccaacgacgcgtctccccacaccaatcacgactatcaggaagctcaggctgcacaacactcaccaccaacacaaaaagtcgacaaacagacaaatccacaaaagggaggtatttcactaagccgtacgaggtcttgcacgggtgtgcagggggtggttcccgtggggtttgtgggttttttcaccatggaatcaatgtttttgtggtttgttgttggaaactaatgtttggttcgctgcgattgcctttgcttctgttgcatgttctgcagatgatttgcccgttgtcgagggtgttgagtcccccgcggctgacgggtctgatgtggtcggcttcggggctggttgggagatcatgggtgttccaggtgatggtggctccgcagagtgggcattcggtttggccttgctgttgggcttgggtgatgagtcttgcccgccagcgccggtgtgaggcggatgcggtgcggttggtgtgtgccatcatgtcccccgatcacctatggcccctgcgagcctctcattgctcctgtaacggcctgggaaccgttgggggtatgaataccctacccttgccctgctagtcgattctgggggctgttttgtggctttgagggggtggcttgaacgttccggggtggttgttttctccactaccccccatgggtgtgaaaaatatcacatcgccccccagcggtgtcaaaagaagaaggacacggaagaaaaaagggggtggatgggtgttcgcgtttcacagcttagcgcctagcgcctagcgctaaaggacacaggctaagcgggaacaccttaaggttttaaagtcttctacttataatatacactttaagtcttacctggcgttaagggtgtgagcgtgacacgccgtacgccttcagccgaacacgctaagccgtaaagggacacaggtagagtgtggggagtgtacaaaccgggagcgtgcgaccggtggtacacgagacacacagttgaaagtccatcagcgttgacggttaaaggttcctcttctcccctgatgaagaaaagaagagaagagagaaagtaccaaagagagaagagaagtaaagaagttaaccctttagctcttctaaaacttttataacttataagctttaatacttatattatattattatacctataagctttaagacttataggtataatgttaaagtttaagactgatggttaactttaagtacttaaggtttttaaagtcttatagttacttcaagtattaatagttattttaagttttaaagtcttaaacactgatgtaaagtttatatccttaagtgctaagcctttaaggttttatacttaa

SEQ ID NO: 48 - DNA, 7338 bp, Pahexavirus sp.
  source 1..7338: mol_type = genomic DNA
caataccaacagggccacccaagcgcgaaacacgccgccaagcccgccagcggcacccctcaaagcaccaaacgacggcaacagattcttcaacgcaaccgccaacggggcaaaccctgcaacaagcttccccacacccgcagcaacaataccaaacactgcggtgccgccagcaaacatggcacccaaattcactttagggacaggcaaatgcattctcgcaaaaatgcccttcaactgctccaccttggcgcgcatctgtgcattcattctcgtgatcatgcccggcatacggttaatccacgccaaaatagacggcatcacccgctgaatcccctgatcaaccgacgcaaacatcggcttcacagaatccgtgatagacttgataaccggattcaacgcaacaaaaatctgccgcaacccgttaagaaacggcgccatagccgtagcaccaagataacccagggcacccttaacattcttcatagcgccctcaaacgtctgaccagacgcctgcgcagcaccacccatgccaagcttcatcgcagccgcaaacgtggcaaaatcaatctgccccttcgacaccatctgcgacacctcagccgacgtttcaccagtctgcttagccagcaaagacaacacaggaacacccgccatagtaagctgcaacatgtcatcgccctgcagcttaccgcgagccataacagacgtaaaaatagcgcccgtatcctgaaacgacttaccagaaatataagacacatccgcgacagtcttcaaaacatccgtcatctgcccgccagacttcacacccgaagcagacaacgcggcagcagtcgaagccgcatcacccaacgcatacgacgtgcccgtcacagcctcaatagccgaattcataatcgaagacgtgtcagacgacgtgtgacccaaaccagtcaacttagcctgagcctcatcaatagccatcgccctagcaataccgccaccaatagtcacatcataaatcgacttgaggcccttcttagcaacattgatggcacccatcatcgccgcgccacccaaagccaacttcatgcccttagcaaaaagactacccgaacgctgaccctcagcaggcataacaccagaaagctgtttaccaacatccgacttcaaaccaggcatcttcgtatacaacgacacatatgcggaagcaatctcaccagacatacattattcaccccataatattaatctcgcgagacaccccgccaccggcacgaacacgcgccaaaatatcgtccacctgcccagacgtaaaccgggccctacgctcatccgtcggcctcgccacaggctccggctgcccctcactattagcagacctgtaatgatccagcatgtccaacacagcccactcgcaccactcaaacggacgctgccaaccattcaggtgggccgccaactggctagacgtatcggtacacaacacgccagccagccggacagcctcaccccaacacatctgcgggccaccaacactataaacagaaacaccaaacttggtgcggaaatcgtattcgatggccccacgataatcatcaatcaggccgtggagccaaactattcccccagcgaggcacccttaccgtcaggcttatattccatccactcacggaaaatctcggccacacgaaccataggaagcccctccaaagcctccacagcatccgctggggcggcagcctccaacatagaaaacatcacctcaacctgggcgaaatccgcagactcccccgactgggcaatcttagctgcacgacggaaaacgcgggcaggaacagcctgagccgtctcctccgcatccgccaaaacccagctacggtcaccaatcttcaacgtgtaacctgtgtcactcatctatcaacaatcccttataatgcgtatcagttatcggacggcggattcggatccggctgcggcttcggcggaaccggaggagtatcagcttttaaagccgtcatccacccccgaccagacaccgcatcacccttatggttaatctgggcaggatacgccttcaacgtcacaccatacccgtacacctcgccattcttgcccttaatctcgtcacgatcaacaagctccgcctcagggaaatagtagcggataacctgatccccatcaacaatatccatcaacagggcatgaaccccggtggtggcaccaggagaaatatcaaacgaacccgaatcggatccggcagtaaccttcgactgccaaaacagctcgataacctccttcttcgactcgatcagctcgaaagaaatctcgatagacgactcagtagcaacagtgcgaaccacatccgcattctgccaagccttcaaatcatcagttttacgctccggcttaatcttaaacccgtcatccgacagataccctaaagctgtaagcccatcaggaaccgtcttcacaccatcaatagcgtcaccggcatgagctttaccaatatagacgtcacacgtaacagcagagcgaacattagacgctttacgtgttgcagccatcataacccccaaaaacaatcaaactaaaaatcaatcagcaaaaacaacgatacgcttactcggattcgacaggccgacacaccagctcaaaaagcgaatacacatcaaaacgtgcaccatcaaccagtaaatcaggacccgtagaacgcctacaaaacaccaccggatcaccatcaaccccgtcagccaggaccgcctcgacacgacgcgccaaagacatagcccgatccggcgtatcagaaaacacattcacccgcaaaaaaacctgctcacgcacatgcaactgcgggccaccatcaagagccaaccaaacaaggtcaccctcaaaactatccggcactgtcccagtacaaggtatcccagacagccagccatcatccttgagcacgcgtttagcccacacacgcggatcaccgtaaacgatcacgacgcagccccaatcgacctcgccaacgtgccatgcttcgcctcaatacgcttcccacccttatatgtggtgcctatacgagcgacagcctcgacacggtgaacctgcacctccgacgacaaaccattacggtattgggccttatcgaaagcgttaccgcccacattcgccgaggctgcacgcttgacacgctcgccacgctcagccaacatgccctgcaccccagaagacttcaacacctcacgaatacccggcaagttcagcttcacattcacatcctgagccactacccatcagcccttcttacgcttcacattaatctgcgtaccagcatcccaaccggacatggggtgatgccacaccataggagacccgtcagcctcccacacaacaccccgaatacgccaccggcaacgataatcagcgcccacaacaggggacttgaaaagcatcgaccaatgctcataatccgagtcacggcctgccgcctcatcctcctgcgaaacggaagcatagatggccacattatggtacacagtctcgacaggcttagaccagtcttccaccttgtcaccaagatcatcgacacgaacagtcggatggagcatcacaaccgtttcaccataaggaaaactggtcatatcatatctcccacaatgggccagcgtagccgttaatattcgacccgcacgagcaaccctcaccccacaccgtggaacacacctcagaatgtgcatatcgaccattaatagtgggggtgatagtgaacgctttaccagccccaccatcaccctcacacagcttcttcaacgcggcaatctcggaaggccacaacaagttcgtgggagtattagaccgtgtagtctgagcgaaaggacccgcagactcatactgcacctgcccagacacgcccgtatcattccagcgcaacaaagccctgcgcagaatagccttagcggcatccttgtatttgaaatccggtttagctatacagggggcgacactgacagccacagcctccacatcggcaatcatcgcctcaagcttctctctaggaatatcggcgaaaggctcaatatcctcaggcctcaaaatgatacccatcaacaccaccccctgcacacagcatgaacattatcgcaacaataaatcagttctcagacggcggattaggcttcggggcagccttctccttcacaacagcaaacgaatcaagcgactcgatagccacatacaacacagcctcggcacgaaccataacctcattatggcccttcaggtcacggccagtctgatccgggtcaccatactcgataagctcgatcgggaaattacgctggaaaccccaatgaacacgagagaaatcaccaacaatagccttaacacccgaggcaggcgacatctccggggcacccgaaacagtcgaagaagcaccaacattcaggccgcgccaattatccaaaccagcaaacccggcggcaggatacatcggctgcccggcaagcggagaccccttcggatacacctcagtagacagggcaaacgagaacgccggatccaaagcaacaccgttaggaacctgcaaaccagcaccagcaatcaaaccaacagccttaacaagatcagccgtagcggaatccgtggcatcaaccgtcttcgacgtcttatccagcgacaccttcacagccgtggcaggcttacccgtagccggatcaacaccatggaaagcaatcagatccacggcgcgaccaatcgaggcacccagagcgggggaaatcagatcctgaagcacacccagacggtagtcggcgtcagcccacataaactcgtccgagacacgctgctgagtcacaaccttgataggctgcgcagtaaacgaggaaacatcaaccgaagcagacggcttaacctcgccctcaccaacgatcttcgcgcgaggaacaccactaaacacggcacccttcacagggccgaaaatagtcggctgctccggcgaaagcttcgccaaaacaccagaatcgatagcacggtcacgaaccgcaccaatcatagaaccaggaagctcaagcttccctgcagaaagaaaatcgtcagccatcacaaatcatctcctagaattattgacaagagcatccacaaacgcgacaccctcacgccgtttaacatcatcaacgggggcactccccgcaagacggcgcacacccgcgccaccactactatggtcgatcaaacccttcaaagctttcgcagactcggcaagcgactccttatcgccacccgacaagaaagcgatcgcatcactggacaaaccatactctgaagccacctcgcgcttcacaccctcaagaacaaacccgttgatcctgtcttcgagttcctcattcttgcggcgaagctcatcaatagtagaccccgaatcactatccgaggcgcgaagcttctccaactcggcgaaattacttttagcacgagactcccacttacgagcctcagccttccaatccgtgccagaagacccagaatccgcatccttcacggaaacatcgccgccacgaacctcacccgcagcccgctcatccttcacaacatcaacagtgacaccatccttttcggaatccacggcatcattgtcaacattctgttcttcaacgttttgatcggccatagcctaaccctacactccttgcggaaaacaacacaacattgttgacccccgtgcgggagacaaccctgtgcaccgataaccggcgatacacaaccggaaaccatcatctcatgtcgccaacagtacgcatagccttcaaaatattgccaggcgactgctgcaacccgtgatcatcaacccattcacgagccttctcataaacacgctgatatgcggtgtccgcagaactgggctcccaacgcccaacaacctcaaccaccgtacaaccacaatgatcatgatacttcgaaccaagcggacgcttaccaccacgcttatgacgccgagtatgtccagtagtgagtgccctttctttggtcgtgtaatccgacctcgtagccaacatggcacaaaaagcacacggatcaccatcagtcacccgacgccacgacctaccctgcgcacccgccgaccactcaaccgtgtcacgaccagcattcataacagcccgatcaaaacccgcagccatcgcatcaatcgtgtcattcgcctatgctggtcactcttaagaatcttaatagtcgaaaacgacctagccaaagccgccgcagcatcaaactcgtcatacacaatcaaacccggatccacaccattcaaccggcgaaaatccgacacaaacctggcagccaacgaggccgaaccgtcatggctggcacgctccaactccacacacaaacgcacatactgcgcatctgtcatcttcccggaatgccacaaacgaccaagctcggcataatagcccgcatacttcccagcaaacctgaccgcctcacgctgatacccggcagcagccatccgcgacgcaacacccgaagccatcacctatcaaacctcgttagtttgccgcgatatcgccccagccagtgccgccaacggatccgaagactcggcacgatgccgcatcacagcctcaacctgcacatcatccaaacccaacatctccaacaccgtccgagaatccgccggaagaataccggcacccacaagcttcgtcacagcatcagccgtagccgcccgagtcggggttgaagcatcacgccacctcaaacccacatcaccgaaaaacgcggcctcatcaacactcgaatcaagcgccttagcagccaggaaaccaaccgacagccagccctgaccaaacgacgtttgacgccgctcagcacgcttcacaagccgagattcctcggcagccaaagcctccccactaggtgggttagacgtgataaacccgaaatagcgttccggaaccgcagcctccccagccgtcaactgcgccaacagccgcatctgatccgaatacggtgtaggactattgacaggaaacgaccccacattcggagtgtcaccatcatcatccttatcaacagcccacacagaagccatcgacaggacccagccaggctgcgaaaactcgtcagccgacacaccagtcacccacctttgcggataggcgtagaagtcacgattcaccgactgccccaacagtgtgcgcacagcctcatccgtgtaggcacgaatagacctcgtaatctccgaacggccatcaatcctagaagtacggcgacgattcacaacaggcaccaacggaaccgcacccaacacattctcgatacggcccgtctcaacccactcaccagcccccccccgctccacctgaacaatca

SEQ ID NO: 49 - DNA, 13674 bp, Pahexavirus sp.
  source 1..13674: mol_type = genomic DNA
ggttgggggtgacggcgggtgtcacgtatactgcggagtcggttcgtggtttgccgtgggaggcggccctgatcacagctacggttgctgcggtgttgtcggttgctacatcgtttggtagcccgtcgtttgtggctggcaaacctaaagccacgcctgtggatgcgggtttggttccgccggatgatgggggcttggttgagccgcacatggttggtgtgtcggatcctggcatgattgagccgattgatgatgcggatgttgccggctatgtgccgaggcgtgcagccgagtctgaggttggcacggtagagtctactgttgcataattgaatatatgtgtgtgccccagcggtgctgacacgatctgtggtggttgccgctggggcactattattgtgtctatagtattctatgattcgttgttgttgatggtgtcttcgatcagctggtccaggtggaggcaggcggagatagtatcgttggcctggtgcagaacgttctggccgataacatttttataattgtcgcggtggcagatgatagactgcatgatatcgtcggcttccgcttgcaatagtttggcctggtatgcgattccggcgagccaatctatggcttcctggcttgcccgtgtgtcgtctggaatgccacgggtgttgctgttgtttgggtatcctgcactgtcgcagtcccacaagatttcgctgcactcgtctagcgtgtcctggtcgatagcgagatcgtcgaggctgacttctttgacggtaaggttcacgttgtcgagtgagatgggtacacggtactggtttttgacaccgtcaacaatgttttctagctggttcatgttggtgggctgttgctggacgatgcggtgtatcgctgtgttgagggtggtgtaggtgatgttgtgtgtgttgttcatcgtgttatgccattccttcgttatcgtctggcatgtagtatgtgctgtttgcgtactcggttaacgtcatcagtgtttggtctgcccactgtttcacggtttgccgggtgacacctaatcgttgggcggctgtggcgtaggtttggtcgtatccgtagacttcccggaatgctgccagcctagctaaatgttttcgctgtttggatggttcacaggtgagtgtgtagtcgtcgatggctagctgtagatcgatcatggtgacgatgttgttgccgtgatgctggggggcggttggtggtggtggcatgcccggctcgactgatggtttccatgggcctccgttccagatccattgggcggcttggatgacgtcggcggtggtgtaggttcggctcactggtcatcccctgaacatgttgtcgaggttgtctgggttgctggtggtggtgtcgaatcgtccgacgcagtggcagtagtcgtacatgagtttgataatgtgttggtggtctcccaaataggtgtttccgctgatgctgtaggtggctgtgccgtctttactgatggtgtatttggcggtgatggtttctggtgtttctgtgttggtgatgatggcggtggtggtggcgcctactgtttgtagcctggtggtttgggtgccgtcgtcgaggatggttgtgaccatgatgtgtgttctcccctttcagatgcttgtttggttgtcggctagatgaataatatcggttaaaggtttcggctggtctaggtgttgtatggttttgttggctagccgtttggctaccctgtagcacattttggtgtagtgtttgttgtctaggttgtggtattgttcccgcaccgcaatatatagtagggagtcttggtagaggtcgtctgcactgattgcggggtagtgtgcggctactttggtgcatgcccggttgagtgtgcgaagatgatggtctgtggcccacacccacgatgcggtggtggccaggtcggcttttgttggtcgtctgctcatgacactatttcatctcgctatctggtagttgtttggtgttttgttgtggatagtgtagcacacgagtccagggtggccggtggtgcctgtgcggtgccgataccagacggattctccttccatggatgggcattggatgaaggtgcgttgtccttgctcggagatttctaggtggtgccggtgcccggccatcaggatgtgggatgtggtgccgttgtggaattcttggccgcgccaccattcgtactgtttgccggtgcgccattggtgcccgtgggcgtgcaggatttgtgtgccggccacatcaacggtggtggtcatttcgtcccggctggggaagtggaagtgaaggttgggatattggttgttgagctggtaggcttctgcgatggcgcggcagcagtccacgtcgaaggagtcgtcgtaggtggtgactcctttgccgaagcgtacggcttctccgtggttgccggggatggatgtgatggtgacgtttttgcagtggtcgaattggtggatgagttgcatcatggccatgcgggtgagccggatttgttcggtgaggggtgtttgtgtgcgccaggcgttgttgcctccttgtgacacgtatccttcgatcatgtcgccgaggaatgcgatgtggactcgttgcggtttgcctgcctgttgccagtagtgttttgcgacgatgagggagtgcaaatagtcgtctgcgaagtgtgctgtttctccgccggggatgcctttgccgatttggaagtctcctgccccgatgacgaaggccgcagtgctgtagtcggtgtgggtgtcttgttcgggttttgggggtgtccattcggctagtttatcgacgagttcgtcgaccgggtagggatcggttgcgggttggtggtcgatgattttttgtatggatcggcctgtttctccgttcggtaaggtccgttcggagatgcgtgtgcggcgcacggtgccgttggctagattgtcgtcgatggtgtcgatggcgttgtcgtggttggctagctgtgtgaggagccggtctatattgtctatcactggttttcctcctcttcctcgtgtgtggtggtggcttgtttgcggcggtagtctttgataacggtggcggagatagggtatccggcttcagtgagcatttgggctagctgtgtggcgggtatggacatgtcggcgagtacgtcggcagccttatcaccgtagcgttggatgagggtttcagttttggttgccatgatgtcctaggggttgtgtggtgggctgccatccggtgcggcagtcgccgtcgtgtcctggtttgcgggtgcaccgtgtgatggtgccgtctgtgtggttgagtgttttgccgcacatgacgtcacgcaagtgctcgggcagtacactgtcatcctggttgctggtttgtgtgtcgaagagtgttttctggttggtgaaatgttcggatacggtgccgttgtgtacgggtagtatccatgttttccattgttgttgtagccgtgtgttccagtggaattgtttggcggcgttcgtggcttgtttgatggttttgaagtagcctacaatgatccgttgatggtcgctatcgggcttgtgtggccccttccaatattgggcagctacagcgtacctgttgttgtctgtgaagcgcccccagcagtattccaccatgtgtgatagtaccttgtcgggcatgtctcgtacttggttttcgtcgagccacgcgtcgacaatgatgttgcgtatggcttgcttgtctttggtggtgggtttgaatgcgatgctcacagtacgggcctgtcgtcttgcatgaactggttgaaggtgttgttcccggcgtgttgggcttgtgtgatttgctggtcggtccagtctggatgttgctgtttcagataataccagtggcacgcattgtaggtttcgtcttgtagccgggtgagatggttttcggtgatgatttgtttccacatggcccatgacacgtcgagccggttgaggatttcgagggctgggatgttgaactggtcgaggaacaggatttcgtgggtgtagtagtttttctcgtaggcgtcccatccgcttcggtgcctgttgggctggttttcggggtaggcttcccggcagattttgtgtaaacgcttggccatgtcgtcgggtagtttaatgtcggggttggcgcggatcatggatcgcatcccatcataggtggtgccccaggtgtgcatgatatgcagtgggtcttcaccgtctgcccatttttctgctcagatggcgaggcggatacgcctcctggctgcatggctagtgttgcgccgattggggattgggcacgtgtcgaggggatccatgatgttttagtgtacctttccggtttcgtgttgttgacgtgttttattgtagcactgtgtctagtgcttgtgtcaaccctgttttgccggcctgcaggtaggtgtctgtgacatccccgacagtgaggggcacatgggtggcttgcggtaatgcttgggttagggtttgcgccatctggtcgcctgctttgtctgggtctgaccagatgtaaacatggtcgtagccttcaaaaaatttggtccagaaagtttgccacgaggtggccccgggtagggctacggccgaccatccgcattgttcgaggatcatggagtcgaattcgccttcgcaaatgtgcatttcggctgccgggttggccatggcggccatgttgtagatggagcctgtgtccccggctggtgtcaaatatttggggtggttgtgggttttgcaatcatgctggagtgagcagcggaaacgcatttttcgtatttcggctggctcccaccagacggggtacatgtaggggatggtgatgcactggttgtagtcttcgtggcctgggatggggtcattgtcgatgtatccaaggtggtggtagcggactgtttcttcgctgatgcctcttgctgagagcaggtcgagtatgttttcgaggtgggtttcgtagagggccgaggctttctggattcggcggcgttccgcaatgttgtatggttgtagtgagtcgtacattctggttttttttctctagtctttgtttcagtttgttgagtcctcctccgacaccgcatgtgtggcagtaccagacgcccttgtcgaggttgatgctcatggagggctggtggtcgtcgtggagtggacagaggatgtgttgctcgttcttggacggattgtaccgtatctggtaggcgtcgaggaggcggcaggtgtcagaggtgtgggaggagctcgttgagggttgataccacataggcttcgctccagggtttgttgcgctgtttcatcactacgagtccgatggcggactggttttcgcggtttcggtgggtttcatagttgcgtgcctcccggctggcttgtttcacgaattcggcgaggtgtggctggccggctttcgcttcgatcacataggtgtggttgctggttgtgaggatgaggtcgccttcgtcctctttaccgttgaggtggaggcgttctatatcatggccggtgtcgcgtagctggtggaggagtcgtgtttcccattctgcgccggcccggcggttgcgtgactgttgtgtcgacatgatagtcctttgtgtgttgtggtcatgttccatggctgtttttcggcgagtggcccgaagaatgtgtattcggggtaggctctgagtctttcgtatcgggttccgtctgggctggatttgcctgtgcgctgtttcaacactgcgatgcgtgcctcggcggggatggtgagcccgttgccgttatcttcgccaccatacagggagactccgaggatgagttgtggtttttcggagaggccgtttttgatttcgcggcgtgccggggggtgttcgatgtcggttcctgttttgtcggttgcgtggtgggtgacgatgatggtggagccagtatctctgcccaatgctgtgatccattgcatggcttcttgctgtgcctggtagtcactctcgcagtcttggatgtccatcaggttgtcgatgacaatgagtggtgggaaggtgttccacatttccatgtaggcttgtagctccatggtgatgtctgtccatgtgatgggtgactggaatgagaatgtgatgtgttggccgtggtggatgctgtctcgatagtattctggcccgtagtcgtcgatgttttgttgtatctgtgtggtggtgtgttgggtgttgagtgagatgattcgtgtggaggcctcccagggtgtcatgtcccctgatatgtagagggcgggctggttgagcattgctgtgatgaacatggctagcccggatttttggctgccggaccgccccgcgatcatgactaggtcccctttgtggatgtgcatgtcctggttgcggtagaggggttctagttgtggtatgcggggcagttcggcggctgtttgggaggctctctcgaaggatcgttggagagagagcatcggagccttaatctatctgtcggtttggttgttggtggtcagatggagtcgatgtctacatcatcactaccggtggtgttgggcttgctgtctcgccgatcaacgtaggctgctacaaggtcgtagatggcgtcatccaatggtttgagcacgaccgcgttgaagccgtttttggtgcgcacggtggcgagtttgaaggcctgctcctcgccaaggtaggcttccaggtcgcggatcatggagtgtgggcggtcgttgttgccgcgggctttctcgataatggcgttggggatggtttctggggtgccgttgttgagatcgtctagggtgtggaagattgggacatcggcgtagatgcggtctgcggtctgtccgccgtagccttcggtgttgtgctggacgtcgtggattttgaaggcgatggcggtggcgtcctggtttcgggaggggttgaagaaggtgctgttgttgtttcggtagtttgcgagtcccataactgttgtttccttttactgtttgtgttgttttgtttgttggtttgtgtcggttttatcgggtgaggctgtttcgtttagtgcggaaggcttcggatacgtcactgttactggtgatgatcttcttgtactgtttgaggaggtcggctagctgtgctttgcttgtggcattgttgattttgtcgatgatggtgttgtttccttcactggcgatgttgtctacgtagtctttggcggcctggttgtatcggtcttggaggatgatggatgcgcttgctaccagggtggctaggtcccaatcctcggagatggtgttgtctttgagcccgcctagcaggtcgatgatggcctgtttcacctggttggcggtgtctcccctaatgacggtccagggtgcggcgtagtcgccgccgtatttgagggtgacagtgtatcggtcgtcgtctgtgttgtcgttcactggtgctccttatcttctttgctttgttgtggctgggtgatggttgtggtgggataccggtaggcttgcgggccgccgtaggcccagcatgagtctcggacggggcagcctttgcacatcggggtgacgtggggtatgaacacgttattcgcgattccttgcatggcgctagtatacatgacgccgatgtggcgtgcagcctcggtgtcgagcgggatgggcccagtatcgtatccggtgtccttgtcgccggaggctgttttgtggctgggtgtccaaaacatgccataggctggctgtatatcatctttgagatggagtaggtgccggtaggtgtagagttgaaggtttccttgcggtatggccccggttttgaggtcgaggatggtgtattcgccggtggcggggttgtggaggatcctgtcaatgtatcctaccacacgggtgtcatggtcgagggtggcttcgacggggtattcgatgccgggctggccgtcgatggtggcgatctcgtattcggtgtgcctcttcctccaggtggtccacctgtccacgtagatgggcccgtagtgcatccaccaatcatagtcttttttgttgggtcctccgctttcgcagacggttttgcaggtgcgcccggaggggcgaatgtcttcgccatcaccgacttggcggatgatctcttcggtgaacaggtcgccaaagggtgggatatccgcatcggtttggtggtaaaggtttttgtcccaggtttcagtgatggcgtggatgacgcttccggccactgtggcataccaggtgtgggctgtggcgtggtagccgtgcatgagtcgccatttttcgccgcattatacccactgtgtcagtgatgagtaggagatgtggtcgggtaggtcgatgatggacggtttttgtgctaggggcattactggtcgcctttgttccatgggttgcgggtgtcttggccggcatcgtgttgctggtaggcgaggagtgcgaggcagtgccaggcggcatgtgccaggtggggtagccctgattcgtggtcgaggttgttgccttgctgccatgatagcaggtgcctgtagagggcgtcaacactgtggctcacggatagccgccggtccagttgttatcgccgtatttggtggcaccatatccggccacttcgccgagggcgtggagggctgtagggtcgatgagggatagcctgcagagtttgagttcttttcgggcaccggtgtcggggtcggtgtacatgcgggtgggcttatccatggtgtgtgtgctccttaggggtgggttactggttgttgttgtgggcgagtgctactgcgagaataatgatggcgagggtttctgcgatgaggatgggtgttgtgatcatttagtgtctcggggattgttggtgagggttgaggcgcctaggagggtggtgagggcgcatgcggcaatgatggcgagggcggctttgtggctggtgccggtggcgtacatccatgtgatgatggcgccctgtatccatgccagtgtggtgaagaacgtttcgtagctgtgtagctcgctgttgttgctgggtgtgttcatgcttgctcctgaagaatggtgttgatggttttataaatgttgtacaggtcggtttcgatagataacagttggtggatttcgtggtcgagatcaatgtctgggttgagggtgttgatgcgggatgcaatatcggtggctgtgcgtagtgtgccgccggtgtggtgaataatgtgtgccgtgtcggcgagtccggtggtgacagcatagtgggggaggagaggcatagctgggatgctccttggcgggttactgttgcgggttgatgttgaggtcggtggcgtgcgggtggtcttctgttccggtgacgaggcagtggacggtgacgggtagtttggatgctcccggctggcggacggtggcgccgtagacgatggagaaggtgtctttgccaataattttgtggagttggaggtcgatgtcggggttgcggttccatttgacaccgtgtgcggcggcctgttgctcggctttgcggttgcaggtgtgtgcggcggtgatcatggtgagaccccgtgaggtttcttcaccccttgcttgggcttgcttgtgggttttggcctgctcggctcgcagtgactgttctgcggctgcctgccgtgctttcttctcagccttgcgctgttggacggttttgggggtccattcggtgttggctgtggtggcctgtggtgcgggttgtgaggcgagtggcggattgtcgtcgggtgctggcatgaatgaggctgcggcgatgatggcggctgtgatgcctgcgatggtgtagccttttttcttgttcatgacggttgtcccctttccggggtgttgttcgttgctgacatgattaatcatggtgtgggcggttcctcatgtcaaggctgcgctcaacgattgtgagcgtttggtgtgtggctaggggttttatcgggcacacagggttagcaggtggccaatattgatgcgggtcacgttccagtagagttgtgtggcttcaccgccggtgagcggcttccactcgtcatggctgaacacggtgccatcggatgcgatgaatgtgttggggcgtagcttgtgaagctcggtctctacatgctgccggtaggcttcggcgaggccctcaaaatccatgtggtcgcaggagaggttttcgaggcgtgtcaggtcgaagggtgtggggcagtcgtagctggcgggggtgtagagctgggtgaagtggtcggcgatcttttgcatgattatttccttttcgttgctgataacgttgttgagggtttatcgggtggatgcgacaaggatggcgtccacatcgatcgtgtcgatcatgtcgtggagttcctcagtctcatcttgggtgagtggctgccagtcctggggtccgtatatggcaccgtcgagggtgacagtccacaggggtctgatgagtcgtacggcttcttcgactttggcacggtgcaggcggcagatgatagacgtgttggtgttgcctatgtcacatcctgccaggtgtgcggggtggagtgggttgatttctgtctgcccgtagaggctggtgaaggatggtgtgatgagtgtgccatccatgggtgatgttcctttctggattgtcttggttggttgttgtggtttttatggtgtgagggttgtgatccatagtcaaggctgcgctcaaacccagtgagcgtttcatgctggagtgtcgggtgtgacagatgtcactgaagcctttattgcccctctcagcgtctcaaatcttctaggggtaggattatatagggttggccctgctaatcgattctaggggccttctagggcgtctcaggggtatgtctggatgatagcgggtgtggcaagtgacgcaaactggaagagggtgttcagtcgggagcactagatggtctggctgcacgggtgcctgaaggactcttcgtttatatgagatatgtcacatcgcctagagtctagggacaccacagacatccaccagcctaccctgcagatggcacaggggacaggaatgcctccctaaggcgcataaaggcccctctgaggctcttgcaccctcaaccctaggtatttgtaccccaatgatattctaatcgattctagggccctttttagagcttacacgagaacagcaccaaagactagtccatcaacccttatcctggttagctaagcctcaactatgtggacagtgtcggatactgtgggggaagaaggacgcggtaaaagaaggaggggggagtatcagccttcacacctgaggtacttcagttcaccttagggtctcagcgctgagcaccgagcccctcaagggctcggcatcagcccgaacaggcacagctcatcagggaaggcttgagagtacgaggagccctagcgacgagtactcgaaagcctgagggaacaccctcagcactgatgggcctagcgtgttcggaaaggacacaggagtacagtgtgacagctgtccgggagtgaaacccgttccgactaggggtttcagccttaacaaccctcaaaggttacaagactctaagaaaatttaaggaaaagtttaggtttaatttttggacctttactaccaaaaacacccgtttacacccctcaaacccgcctatagagccaaatcccccagtttgactcatcccaggtggggtatgataggctggacaggtagccagctggacgcaaggccgaaatccgctgacgcggctttcacccttacatccatcagtctaccaaagacttaaagacctaagggcttagcgctaaggtgctgatagcttagcaccgagccccctcaagggctcggcatcagtcttaaaactttaaacactttaagtaaacttaagagcttagcacttaaagttaattaataaccttaaaggcttacgcacttagcactgagcccttcgaggctcagcatcagtataaagaccttaacatctaagttaagtataaaaccttaaaggcttagcacttaaggatataaacttcacatcagtgtttaagactttaaaacttaaaataactattaagactttaaagaccttaagtacttaaagttaaccatcagtcttaaactttaatattataacctataagtcttaaagcttataggtataataatataatataactatataagtattaaagcttataagttataaaagttttagaagagctaaggggttaacttctttacttctcttctctctttggttctttctctcttctcttcttttcttcatcaggggagaagaggaaccttttgtcgtcaacgctgatggacttttcaccgtgtgactcgtgtgcttctggtcgcacgctcccatcgcacactccccacactctaacacccgtgcccctttcaggcttagcgtgttcggctgaaggcgtacggcgtgtcacgccaacacccttaacactagataagacttaaagtgtatattatatgtagaagagtttaaaacctgtaaggtgttcctgctgagcccgtgttccttcaatgctaggcgccaagcgctaagctgtgaaacgcaaacacacacccacccccatttttctttcgtgtccttctcttttgacacagctggggggcgatgtgatctttttcacacaccggggggtagtggaaaaaacaaccaccccgacacaaacagaacaccccctcaaacgaacaaaacagcccccagaatcgatcagcagggcatcggtagggtattcatacccccagacgattccaggccgttagaggggcaaataagaccagtacagggctaggcgaggaacagacacatcatggcacgcaccaaccgcacagccagccaagcccaccgacgctggcgggcaagactcatcacccaagcacgcaagcaaggccaaaccgaatgcccactctgcggagcccagatagcctgggacacacatgacctgccaaccagccccgaagccgaccacatcacacccgtcagccggggaggactcaacaccctcgacaacgggcaaatcatctgcagaacatgcaacagaagcaaaggcaatcgcagcgaaccaaacattagtttccaacaacaaaccacaaaaaaccttgttccatggtgaaaaacccgccaacccccaccggggacaccccccgcacacccgtgcaagacctcgtacggcttagtgaaatacctcccttttgtggatttgtctgtttgtcgactttttgtgttggtggtgagtgttgtgcagcctgagcttcctgatagtcgtgattggtgtggggagacgcgtcgttggtggcgtgtgtggggtgaggatagtcgcgcgcagtacgtgtctgatgaggagtggctgtttctccttgatgctgcggtgattcatgatgtggtgtggcgtgagggtcgcgcggatttggtggcttcgcttcgtgctcatgtgaaggcttttatgggcatgttggatcgttattcggttgatgtggcgtctggtggccgtggtgggggttctgcggtggcgatgattgaccggtataggaagcgcaagggggcttgggtaggtgtctggtgttgttggttctcaggtgcctcgtcaccgggtggctgcggcttactcggtgtctgctggcggtgatgctggggagttgggtcgtgcgtatgggttgacgcctgatccgtggcagcagcaggtgttggatgattgctgcctcttatacacatctgacgctgg

SEQ ID NO: 50 - DNA, 15968 bp, Pahexavirus sp.
  source 1..15968: mol_type = genomic DNA
gacccctaccccgtcgacgaactcgtcaacaaactagccgaatggacacccccaaaacccgaacaggacacccacaccgactacagtactgcggccttcatcatcggggcgggagacttccaaatcggcaaaggcatccccggaggagaaacagcacacttcgccgacaactacctacactccctcatagtcgcaaaacactactggcaacaggcaggcaaaccgcaacgagtccacatcgcattcctcggcgacatgatcgaaggatacgtgtcacaaggaggcaacaacgcctggcgcacacaaacccccttgacggaacaaatcaggctcacccgcatggccatgatgcaactcgtccacatgttcgaccactgccaaaacgtgacagtcacatccatccccggcaaccacggagaagccgtacgcttcggcaaaggcgtcaccacctacgacgactccttcgacgtagactgctgccgcgccatcgcagaagcctaccaactcaccaacaactaccccaacctccacttttatttccctgacagggacgaaatgaccaccaccgttgatgtggccggcacacaaatcctgcacgcccacggacaccaatggcgcaccggcaaacactatgattggtggcgcggccaagaattccacaacggcaccgtatctaatatactcatggccgggcaccggcaccacctagaaatctccgagcaaggacaacgcaccttcatccaatgcccatccatggaaggagaatccgtctggtaccggcacaagacgggcaccaacggcaaccccggactcgtgtgctacactatcaacaacaaaacaccaaacaactaccagatagccagataaaaaccatgagtagacgacgaacaaaagcagacctagccaccacagccgattggggatggaccacaccagcccaccaacaccagctacacaaagcctgcaccaatattgcccgccgctacccggctgtcaacccagacgacctgtaccaagactctctactatatattgcggtgcgggaacaataccactagctacaaggcaaccagtggacccaaatgtgctaccgtgtagcccaacggttagcaaacaaaacagtcgaccacctcgacctacccaaacccgcccacgaaatcacggccatagcagacaaccaaaccagcaactaaggagaatcatcatggttaccaccatcctcgacgacggaacccaaaccaccaggctacaaaccgtaggctccaccaccaccgctatcatcaccaacaccgaaacacccgaaaccatcaccgccaaatacaccatcagcaaagacggcacagccacctacagcatcagcggcaacacctatttgggagaccaccaacacatcatcaaactcatgtacgactactgccactgcgtcggacgattcgacaccaccaacaccagcaacccagacaacctcgacaacctattcaggggatgaccagtgagccgaacctacaccaccgccgacatcatccaagccgcccaatggatctggaacggaggcccatggaaaccgagtgtagagccgggcatgccacccccaccaaccgcgccacaacaccacggcaacaacattgccaccatgatcgatttgcagctagccatcgacgactacaccctcacctgccagccatccaaacagcggaaacggctagccaggctcgccgcgttcagggaagtatacggctacgatcaaacctacgccacagccgcccagagactcggggtcacccggcaaaccgtgaaacagtgggcagaccaaacactcatcaacctaacaggctacgcaaacagcacatactacatgccagacgataacgaaggaatggcataacacgatgatcgataccacaaccaataccctctacaccgccctcaacacagcgatacatcgaatcatcaaacaacagcccaccaacatgcaacagctagaaaacattgttggcggtgtcgaaaaccagtaccgtgtaccaatctcactcgacaacgtgaaccttaccgtcaaagaagtcagcctcgacgatcttgctatcgaccaggacacgctagacgagtgcagcgaaatcctatgggactgcgacagcgcaggataccccacaaataacagcaacacccgtggcattccagacgacacacgggcaagccaggaagccatagattggctggcaggaatcgcataccaggccaaactactacaatcggcggccgacgatatcatgcggtctatcatctgccaccgcgacaaccacaaaaatgttatcggccagaacgttctagaccaggccaacgatactatctccgcctgcctccacctgtatcagatgctcgaagaaaccatagacgacaacgaatcatagccatatcgcataaacaaaaagagtgccccagcggcaaccaccacacgatcgtggcagcaccgctggggcacacacatattcaattatgcaacagtagactctaccgtgccaacctccgactcggctgcacgcctcggctcatagccggcaagcccagcatcgtctagcggctcgatcatgccaggatccgacacatccaccgagtgcggctcaaccaagcccccatcgtcggggggaacaagcccagcatccacaaccgtggttttaggtttgccggccacaaacgacgggctaccaaacgatgtagcaaccgacaacaccgcagccaccgttgctgttatcagggcagactcccacggcaaaccgcgaaacgactccgcagtatacgtgacacccgccgtcacccccaacacagcaacaaacgtttgcacaaaagttttcagggcacgctccagtaggcccaaccaaaactgtttacccatcacacatcacttcttcaaccgggccacatccgcctcaagcctggcaagacggctacgacactccaacacgtaataccagacactccacagggcatccttgctacgccacagcttccccgtcaccggattcttcacccacgacaaagcctccacacagcgcgccaagtcaccattctgaacctgaaccacacccacatcgtgatgcagcttattcaccgactgggccacctgcccagacaactgtttaatctgatcatgtaacgctttcacatcagccaccgttaactcctcactctctccactgccgccattgacgacggccataaacctatcccacggaaaccacggccccggatcgtcatgatccgactgatgccacgcatccgtcacatcagtatgcccgcagatgccccgcctaccagccttcaaatcggccacagacagcttccttttcggaacattatatttgtcacacaactgccggcacagcaccgccgccctctcaacggcaggccacaccctaggatcaagccactgctccctcgtgtaagcatggcctggtacacggaacgaggcgtgcgaacccccatccgcgcaaatctctatacccaaagaatgcggattcggcggggcatgccaaccaatcgtagactcagacaagcactgcaccgtctccccaatatcgcaaacataatgcgccgaaccaccagacgatggggacgcgaaatagtttgccgtggacaccgcccgccctttacgggaggcagacggaaaccccacatccgggcacgtcgcatgaatcacaaccctattcaccggactattcgaaccggccgaatgatgcgccgcaggaataaacatcaccacacaccaccaccaaacactaccatcacagccactcctttctatttgtgggatgatatagtcactagaggcgacggggccacaccctggcaggccaccgagcccgagatcgtggaagccacaccatcactatatttcacaaacaggcgaccctcagaacagtacacagacaccaccgagcggccatccttaccatctttaccatcggatccgttgacaccggcggggccgcgctcacctcgttcaccctggagcccttgggggccggcaggacctgaagggcccacatcaccgcgctcaccggccgaaccatcccgaccagcagtgccatcaacgccgttcacaccgtcagcacctgcacggcctggaacaccatcacggccatccgacccattagcaccaggcaacccgtcaggacctttcacaccattcaaaccaggagaaccctgcggaccaacagggccaacaagcccagccgaaccattaacaccatcccggccatccacacctgcagggccttgcgggccacgcacaccagccggaccgggcacacccgcaacactccgctccgtgcgggcagcatccacacacaaaccagaacggtgaagcttaacagactccacaccaccctgggtacacacctgctttacacgactggctaaacctttagccgctataccattagactcggccctagcctgctccgaatcccgctcagaagacaccgatccgaaacgcaaagcacccccagcaaccaccatcaacagtacaagcgacaggaacaacaacagcagggaagccttctcaaaattgcggcgctgccgcttctcctcctccaactccctcacaattcaccccccaccgctatcaacagtatccttcaaaaactcgggcagatcaggcatctttaccggctcaacattctccggcagattcgcgttatagcggtgaacaatatggcgaatattccacgtgtactcttccatcgcatcaacctgctcagacaactgcctcagcctcttcttcgacctgtaagtaaccgcctgaatcgaaccaaggacagtagcgatagcggtacaaatagaggctacgagtgtgggtgtaaaccatgacactacagccccctaccactacaaccaccacaacgtgtcacatacccgcaagccgcgcattacacgccgacagcaatccagttagcaaccgcaggcacaccattcggcttagacccgtcattcgtaataaacgccaactgaaaatccttattagtaatattgtaggctttcacatcaatctgtgtcgtacccccagccgccgtagccatagacgccaccacaacaggcggagcagtgaactggcgatcaaacgggatcgtgtaagcatacacagcagacccgccaaactggatctgcttagtgcccgtctcaatccgcggggacaacagcatccactcgccggcatggttagcccacacagcccccgaaggcaccatcacacggtcaccctccacgggggtcgggtcacaagccgcagactccccaaacgccacacgagccgccacagcacgcctatccaactgctgctgcaacccgttagacgacaacaccaaagtagccaacaactgctgatgaaacacgccaggctccgcacgcaacacatccccggcacgctccgcacgccccccaggaacaatctccaacttggccgtattctgcccccaatcccgagacaacaccacatagtcgtatcgggtctcgccagggccaggcagctgccctgtcaccgtctcaacactactagaagtgcacatcaccccgtgagcccaagcctgccccggcaacacctcacacaacacagtggcaccctgaacagtagtgcccacacgaaattcgtccggccctttcacggacggcatattacccatcagaccagacatttgagcccaatcatactcggtcaacacaccatcaaaccctttacacacaatagccacaacaaacccccatcattctagaatttttgcaaatcccgcacaccggcagccaaaccagccacacgccgtgctagcaacgccgacggattatcctcataatcgccggcaataggagtaacctccgtccagccgtcaccaggcgaatcacactccacatcaatctgccgcacaatctccgcaatagggccagaacccacatccacatagatcaggtcacccggcatcaggcggccgggcccaaaccgcaacacatccgactcggccaactcgatcttaaaccccgacgtggcccctaactcggacaacacctgctcagcctcatcaataagatgcaccttctcggaatccgtgttacgggcatccttaaacacctcgacacgatcaaaccactcatcctcggccatcgaatcaacatcctcacaaaacagccgatccttaccctcgccgcggccaccaaccaccaccgaagtagccttcggggcatcacgcacatactcccacgacacaatcgaaccagactcggcagtcaacacatgactacgggtcacagcaggcacacaatcaaacattaaaccacgctgatcctgcttcacattctcaaactgtttcaccgtgacagtcatccgagcccacgacaatatcggcaacaacttatcggcaaacacgtgaaaccgcgcctgaaaatccttaatatagcggccacgactcttatcatccaccataaatatatcaggcggaaaacgccaagtattatcccgcaacgccttcttagcgaccgactccgccgcacccgaatagtgggcataatccctgtcggcacgccactccataccaaccaaaccaggacgataattcacaggccacatcagcatacgccacaacaggcgaatatcatcctcacacgtgatagtcacccgcgaagaacgccaaggacccacaccgtgcacccgacgcacaggcccagaaaaaatctggccaccaccataatcaacaaccagccgtgccccaggcttcgttaacatatccagtctggaatgatcacccgacaccaccaactccaaagtcgacaaaccattccacttcaacgacaactttagcgactcaaaaaaattgataggcgccacacggcgataatccggcgtaaacaatgttacatgcggaacaagaccagccacaaccgctcaccaagccctcaaaaacctgtactgcaccgacacaacaacggcacccaaaccaaccatctcaatactcacactcttcgaaccgccaggcggaataggcgcaaactcccactctgtcaaacgatccatcacatcctcaaacccatccaacaacgcagactgtttacgaggatccgtatcaatagtgatccaatcatactcctcgacaggataatccgaagacacacgcaaaccatcaatctgcacagaccacgactccaaaggcccctcaacacgaatcacaggccacgcaggcacatcacccttattagacaagttatcccagccagaaccaacaccaggcgtcaacaccacaggaaacgccgtaccatccttgtcgaccgggccgccacccaaccaatcctgcaacttcgcgttactaaaacgaaacttatgctcatccccataccaaaacgggtcataagctgtcaaatgaagcacatagcgggcatagccgcgattcaccggatcaaccgtaaacgtgtcatccaccgaatcaaaccggcagtgtagcacacgctctttgccggcaggagtcttcgccgacaactcccccacctcgcccggaggaaaagcagaccacaactcgtcataggctttcaaaaaaccgtcacgaaacctgcccaccggatccgggtcaacacccgacaccaacaccggtaatgtcacctcgcgaggcttcacattaaacccgcgccactccgagccgtgcaccccaacatgagtttgagaaaaatgctcaacctcaggcatacccaagccgcgcaacgaatcattcaacaacatgacaggagacaaccccgtataatccgtcaaatgaagcacacgctcatcgccaaaccgcggatccatagtccaatccacagtcaaaccggcacgatcagacgggtcaggaataaacatgaacaacacccccaatcacacgtaagccaacgcgttcaacgcgtcacgctgctgccgctcaatccgcttcgcaaactcgttaggatccccataagtaggcccattcacattcaccacaacactcttatcattcatacgctgatacctgccatacggggtaaacgagcccacagacgaccgcacaccaaaccgggcatcaaccgcatcaggaagacggccagccacacccgacatcgcatccaacgccaagccagcactcccagtaataccctcagccaaaccggcaacaacctgccggccaacctggtcacgaaacaccctagacggggaatgaatacccaacaccgacttcgccgcaatagcaacctgagaacccatattacgcaccgtatccaacaggccactcatagcattcttaataccattacccaaaccggcaacaacattatggccagcagacaccaacaaggaccccatgttacccaaggcacccctaatatcgctgggcagattccggaaaaaccctatcacactatgcacaccactagacacagccgagcccatagcgtgcatagcagaagaagccgcactccgggcaccattaaacccgcgcacagcaccactacgaaccctagacgccatcgacccgaaaaacccgccaacagcagacgccaccgaagacacaacaccccggatagcattcatcgcagaagaaacagcaccacgggccgcgttaaaaccagacctcacatgggaggcaaccgaagaacccagccgggcaaaaaaccccacaaccgcggccacaccggcagaaatgatcgacttgaaaccgttaataaacgcagacgtaaacgccctaatatgattccagccagcctgaaccaccgaacccatacgcgccaaaccagacacaaaatgggcaacaacccacgagatgacacgggcaacagcagcaatcacacgggcaacagccgacacgacagcaccaacaatacgggcaacaaaccctaccacagcagccaccatcggagccaccacagcaagaatacgggccaccacctgtatcacaaccgcaacaacctgaaccaccacacgcataaccgccgcaatcacaggcatcaacgaccggatcaaaccaataacaggcggcagaacagacatcacagcacccaaaatctgctgaatcacaggcatcaacaccggcaccaactgcgacacaacaccaacaacctgccgtatcacagcaacaacagcctgaataaccggcatcaacgtaggcagcaacatggccgcaacctgcgtcaccatgccaataatctgcgtgatcacaggcaccagccgggccaccagcataccaatcacaggcatcaactgggcagccaaaccggcaaccatgccgataatctgggcaaacactggcgccaaccgtgccaccaaaccagcaattagaccaaacacaggctgcacagcggccataatctgccccaaagcctggccaaccacagccacaagctgcatcaccgcggcacggaactgggcgttcgtagcaaacatggcagcaaacagcccgatcacaataccgacagggccacccagggcgcggaacacgccgccaagccccccggcggcacccttcaaagcaccaaacgacggcaacagattcttcaacgaaaccgccaacggggcaaaccctgcaacaagcttccccacaccggcagccacaataccaaacactgcggtgccgccagcaaacatggcagccaaattcactttagggacaggcaaatgcagcctcgcaaaaatgcccttcaactgctccaccttggcgcgcatctgtgtattcattcgggtgatcatgccaggcatacgattaatccacgccaaaatagacggcatcatccgctgaatcacctgatccaccgacgcaaacatcggcttcacagaatccgtcaccgacttgataaccggattcaacgcaacaaaaatctgccgcatcccgttaagaaacggggccatagccgtagcactaagatagcccagggcacccttaacattcttcatagcgccctcaaacgtcttaccagacgcctgcgcagcaccacccataccaagcttcatcgcagccgcaaacgtggcaaaatcaatctgccccttagacaccatctgcgacaccccagccgacgttttacccgtctgcctagcaagcaaagacagaacaggcacaccagccatagtaagctgcaacatgtcatcgccctgcaacttaccgcgagccataaccgacgtaaaaatagcgcccgtatcctgaaacgacttacccgaaatataagacacatccgcgacagtcttcaacacatccgtcatctgcccgccagacttcacacccgaagcagacaacgccgcagccgtagacgccgcatcacccaacgcatacgacgtaccagtcacagcctcaatagccgaattcataatcgaagacgtgtcagacgacgtatgacccaaaccagccagtttagcctgagcctcatcaatagccatcgccctagctataccgccaccaatagtcacatcatagatagacttgaggcccttcttagcaacattgatggcacccatcatcgccgcaccaccaagcgccaacttcatgcccttagcaaacagaccacccgaacgctgcccctcagcaggcataacacccgacaactgtttaccaacatcacttttaaggccaggcatcttcgtatacaaagacacatatgcggaagcaatctcaccagacatacactattcaccccataatattaatctcgcgagacaccccgccaccggcacgaacacgcgccaaaatatcgtccacctgcccatacgtaaaccgggccctacgttcatccgtaggcctcgccacaggctccggctgcccctcactattagcagacctgtaatgatccagcatgtccaacacagcccactcgcaccactcaaacgggcgctgccaaccattcaggtgggccgccaactggctcgacgtatcggtacacaacacgccagccagccggacagcctcaccccaacacatctgcgggccaccaacactataaacagaaacaccaaatttagtgcgaaaatcgtattcgatggccccacgataatcatcaatcaggccgtggagccaaactattcccccagcgaggcacccttaccatcaggcttgtattccatccattgacggaaaatctcggcaacacgaaccataggaagccactccagggcctccacagcatcagccggggcggcagcctccaacatagaaaacatcacctcaacctgagcgaaatccgcagactcacccgactgggcaatcctggcggcacggcgaaaaacgcgggcaggaacagcctgcgctgtttcctccgcatccgccaacacccagctacggtcaccaatcttcaacgtgtaacctgtgtcactcatctatcaacaatccctcaaactatgtgtatcagttatcagacggcggattaggatccggctcaggcttcggaggcttcggggctggaggaggagttggaggagtatcagcttttaaagccgtcatccacccccgaccagacaccgcatcacccttcttattaatctgggcaggatacgccttcaacgtcacaccatacccatacacctcgccattcttacccttaatctcgtcacgatcaatcaactcaacctcagggaaatagtagcgaataacctgatcgccatccacaatatccatcaacagggcatgaacacccgtcgtggcaccaggagaaatatcgaacgaacccgaatcggatccggcagtaaccttcgactgccaaaacagctcgataacctccttcttagactcgatcagctggaaagaaatctcgatagacgactccgtagccacagtgcgaacaacatccgcattctgccaagccttcaaatcatccgttttacgctccggcttaatcttaaacccgtcatccgacagataccctaaagcggtaagaccgtcaggaatcttcccaacaccatcaatagtgtcaccggcgtgcgcgtcaccaatataaacgtcgccagtaacagccgagcgaacattggacgctttacgtgttgcagccatcacaacccccattaaatatcaaacaattacattaaaacaaaaacaaatacgtttactcagattcgacaggcctacatatcagctcgaacagcgaatacacatcaaaacgtgcaccatccaccaaaagatcagggccagtagaccgtttacagtacaccacagggtcaccgtccacaccatccgcaaggacagcctcaacacgcctggctagcgacatagccctatccggagtatccgaaaacacgttcacccgcaaaaacacctgctcgcgcacatgcaactgcgggccaccatccaacgccaaccaaatcaaatcacccgtaaaatcgtcagacaccgtccccccacagggtatatcagacagccagccatcatcagccaacacacgtttagcccacacacgaggatcaccgtagacgatcacgacgcagcaccaatcgacctcgccaacgtgccatgcttcgcctcaagcattttaccacccttataggtggtgccaatcctcgccacagcctcaacacggtgaacctgcacctccgatgataacccggcacgatactgggccctatcgtaagcattaccgcccacattcgccgatgcggcacgcctaacccgctcgccacgctcagccaacatgccctgcacaccaggagacttcaacacctcacgaatacccgacaagttcagcttcacattcacatcctgagccacaatctatcagcccttcttacgcttcacattgatctgcgtaccagcatcccaaccggacatggggtgatgccacacgataggagacccgtcagcctcccacacaacaccccggatacgccaccggcaacgataaccggcacccacaacaggggacttgaaaagcatcgaccaatgctcataatcagagtcacgacctgccgcctcatcctcctgcgacaacgaagaatagatagccacattatggtacatagtctcgacaggcttagaccagtcttccaccttgtcgccaagatcatcgacacgaacagtcggatggagcatcacaacagtttcaccgtaaggaaaactggtcatatcatatctcccacaaagggccagcgtagccgtaaatattcgatccgcacgagcaaccctcaccccacacagtagaacacacctcagagtgtgcatatccgccatgaatggtcggtgtgatagtgaacgctttaccagccccaccatcaccctcacacaacttcttcaacgcggcaatctcggaaggccacaggaggtttgtgggcgtattagaccgtgtagcctgggagaacggccccgccatctcatactgcacctgacccgacacgccggtatcattccagcgcagcaaagccctacgtaggatagccttagcagcatccctatatttgaaatccggtttagcgatacagggggcgacactgacagccacagcctccacatcggcgatcatcgcctcaagcttcccctcaggaatatcggcgaaaggctcgatatcctcaggcttcaaaatgatacccatcaacaccaccccctgcacacagcatgaacattatcgcaacaaatagatcagttaccggccggaggattaggcttcggtgcagccttctccttcacgatagcaaacgaatccagagactcgatagccacatacaggacagcctcggcacgaaccataacctcgttatggcccttaagatcgcggccagtctgatccggatcgccatactcgatcagctcgatcgggaagttgcgctggaacccccaatggacacgagagaaatcaccaacaatagccttaacaccagaggcaggcgacatctccggggcacccgaaacagtcgaagaagcaccaacattcagcccacgccaattatccaaaccggcaaacccggcggcaggatacatcggctgaccggcaagcggagaccccttcggatacacctcagtagacagggcaaacgagaacgccggatcaagggcgaccccgttaggaacctgcaaacccgcgccagcaatcagaccaacagccttaacaagatcggtcgtagcgctatcggtggcatcaaccgtcttcttcgtcttatccagcgacaccttaacagcagcagcaggcttacccgtagcaggatcaataccgtggaaagcaatcagatccacggcgcgaccaatagaagcaccaagagccggggaaatcagatcctgaagcacacccagacggtaatcagcatcagcccacataaactcgtcgctcacgcgctgctgagtcacaaccttgataggctgcgcagtaaacgccgaaacatcaacagacgcggaaggcttaacctcaccctcaccaacaatcttggcgcgaggaacaccactaaacacagcacccttcacagggccaaaaatagtcggctgctccggcgacagtttcgccaaaacaccagaatcgatagcacggtcacgaaccgcaccaatcatagaaccaggaagctcaagcttccctgcagaaagaaaatcgtcagccatcagaaatcatctcctagaattattgacaagagcatccacaaacgcgacaccctcacgtcgtttaacatcatcaacgggggcactccccgcaagacggtgcacacccgcgccaccactactatggtcgatcaaacccttcaacgccttagcagactccaccagtgcttcacgatcgctaccgtgcaagaaagcgacagcatcacccgacaggccacactctgaagccacctcgcgcttcacaccctcaagaacagacccgttgaccctgtcttcgagttcctcattcttgcggcgaagctcatcaatagtagatccagaatcgccactcgaggtacgaagcttctccaactcggcaaaattacttttagcacgagactcccacttacgagcctccgccttccaatcagtcccagacgatttaccctcgccttcattcttcaactgattgtcggctacctcctgcccgccatcgtcttttactgtatcaacaatgccgttatcctttccggactccacaatatcattgtcaacattcagttcctcaacactctgatcggccatagcctaacctacactccttgcggaaaacaacacaacattgttgacccccgtgcgggagacaaccctgtgcaccgataaccggcggcacacaaccggaaaccatcatctcatgtcgccaacagtacgcatagccttcaaaatattgccaggcgactgctgcaacccatgatcatcaacccactcacgagccttctcataaacccgctgatatgcggtgtccgcagaggagggctcccaacgccccacaacctcaaccaccgtacacccacaatgatcatgatacttcgaaccaaacggacgcttaccggcacgcttatgacgccgagtatgaccagtagtaagcgccctttcccgagtcgtataatccgacctcgtagccaacatggcacaaaacgcgcacggatcaccatcagtcaccctgcgccacgacctaccctgcgcacccgcagaccactcaaccgtgtcacggccagcattcatgacagcccgattaacacccgcagccatcgcatcaatagtatcatgggctttatccgggtcactattcatcatcttcatagtcgaaaacgacctagccaacgcggcggcagcatcaaactcgtcatacacgatcaaaccaggatcgacaccgttaagcttccgaaaatcggacacgaatttgcccgccagcgccgcggaaccgtcatggccggcacgctccaactccacatacaaacgcacatactgcgcatctgtcatcttcccggaatgccacaaacgaccaagctcagcataatagcccgcatacttcccggcaaaacgaatcgcctcacgctgctacccggcagcagcaagcctcgcctcaacccccgaagccaacgcctatcaaacctcgtt

SEQ ID NO: 51 - DNA, 11312 bp, Pahexavirus sp.
  source 1..11312: mol_type = genomic DNA
acctagtggggaggctttggctgccgaggaatctcggcttgtgaagcgtgctgagcggcgccaaacgtcgtttggtcagggctggctgtcggttggtttcctggctgctaaggcgcttgattcgagtgttgatgaggccgcgtttttcggtgatgtgggtttgaggtggcgtgatgcttcaaccccgactcgggcggctacggctgatgctgtgacgaagcttgtgggtgccggtattcttccggcggattctcggacggtgttggagatgttgggtttggatgatgtgcaggttgaggctgtgatgcgtcatcgtgccgaatcttcggacccgttggctgcgcttgctggggctatatcgcggcagacgaacgaggtttgataggcgatggcttcgggggttgaggcgaggcttgctgctgccgggtatcagcgtgaggcgattcgttttgccgggaagtatgcgggctattatgccgagcttggtcgtttgtggcattccgggaagatgacagatgcgcagtatgtgcgtttgtgtgtggagttggagcgtgccggccatgacggttcagcggctatggcgggcaaattcgtgtccgattttcggaagcttaacggtgtggatcctggtttgattgtgtatgacgagtttgatactgccgccgcgttggctaggtcgttttcgagtatgaatatgatgaatagtgacccggatagggcgaatgacacgattgatgcgatggctgcgggtgttaatcgggctgtcatgaatgctggccgtgacacggttgagtggtctgcgggtgcgcagggcaggtcgtggcgcagggtgactgatggagatccgtgcgcgttttgtgccatgttggctacgaggtcggattatacgaccaaagagcgggcgctcactactggtcatactcggcgtcataagcgtgccggtaggcgtccgtttggttcgaagtatcatgatcattgtggttgtacggtggttgaggttgttggcccttgggaaccaaatagggctgatgccgagtatcagaggacgtatgagaaggcccgtgagtgggttgatgatcatgggttgcagcagtcgcctggcaatattttgaaggctatgcgtactgttggcgacatgagatgatggtttccggttgtgtgccgccggttatcggtgcacagggttgtctcccgcacgggggtcaacaatgttgtgttgttttccgcaaggagtgtagggttaggctatggccgatcagagtgttgaggaacagaatgttgacaatgatgctgttgagcccggaaagggtggagacattgttgatgttgtgaaggatgggcaggctgccggcgatgatcatgccggtgatgtttccgtgaaggaggagtcttcttctggcacggattggaaggctgaggcccgcaagtgggagtctcgtgctaaaagtaatttcgccgagttggagaagcttcgtacatcgagtgacgattctggatctactattgatgagcttcgccgcaagaatgaggaactcgaagacaggatcaacgggtttgttcttgagggtgtgaagcgcgaggtggcttcagagtatggtttgtccagtgatgcgatcgctttcttgtcgggtggcgataaggagtcgctggccgagtctgctatggctttgaagggtttgatcgaccatagtagtggtggcgcgggtgtgcgccgtcttgcggggagtgcccccgttgatgatgttaaacgacgtgagggtgtcgcgtttgtggatgctcttgtcaataattctaggagatgatttgtgatgctgacgattttctttctgcagggaagcttgagcttcctggttctatgattggtgcggttcgtgaccgtgctatcgattctggtgttttggcgaagctttcgccggagcagccgactatttttggccctgttaagggtgccgtgtttagtggtgttcctcgcgctaagattgttggtgagggcgaggttaagccgtctgcttcggttgatgtttcggcgtttactgcgcagcctatcaaggttgtgactcagcagcgtgtctcggacgagtttatgtgggctgatgctgattaccgtctgggtgtgcttcaggatctgatttcgcctgctcttggtgcttcgattggtcgcgccgtggatctgattgctttccatggtattgatcctgccactggtaaagcggctgccgctgtgtatacttcgctggataagacgaagcatattgttgatgccacggattctgctacgaccgatctggtcaaggctgtcggtcttatcgctggggccggtttgcaggttcctaacggggttgctttggatccggcgttctcgtttgccctgtctaccgaggtgtatccgaaggggtctccgcttgccggtcagccgatgtatcctgccgccgggtttgccggtttggataattggcgcggcctgaatgttggtgcttcttcgactgtttcgggtgccccggagatgtcgcctgcctctggtgttaaggctattgttggtgatttctctcgtgtccattgggggttccagcgtaacttcccgatcgagctgatcgagtatggcgatccggatcagactggccgcgatcttaagggccataatgaggttatggttcgtgccgaggctgttctgtatgttgcgattgagtcgcttgattcgtttgctgtggtgaaggagaaggctgccccgaagcctaatccgccggccgagaactgatttattgttgcggtgatgtgtccatgtgcagggggtggtgttgatgggtatcattttgaagcctgaggatattgagcctttcgccgatattcctagagagaagcttgaggcgatgattgccgatgtggaggctgtggctgtcagtgtcgccccctgtatcgctaaaccgggtctcaagtttaaggatgctgcccgggctattttgcgtcgggctttgctgcgctggaatgattctggcgtgtcgggtcaggtgcagtatgaggctgccggcccgtttacgcaaactatacggtcgaatacgtcttctaatctgttgtggccttccgaggttgctgcgttgaagaagttgtgtgatgagagtggtggcgccggtaaagcgtccacgatcaccccgacgatccgtggcggatatgctcattccgatgtgtgttctactgtgtggggtgagggctgttcgtgcgggtcgaatattaacggctgcgatggccctttgtgggagatataaggatggctggttttcctttcggtgaaacggttgtgatgcttcagccgactgttcgtgtcgatgatcttggtgacagggttgaggattggggtcatcctgtagaaaccgtgtaccataatgtggccatctattcttctgtgtcacaggaggatgaggcggcaggccgtgactctgactatgagcattggacactgctttttaagcagcttgtcaaggatgctggttatcggtgtcgttggcgtataaggggtgttgtgtgggaggctgacgggtctcctatcgtgtggcatcaccccatgtctggttgggatgcgggcacgcagatcaatgtgaagcgtaagaagggctgatgggttgtggctcaggatgtgaatgtgaagctgaacttgccgggtattcgtgaggtgttgaagtcttctggggtgcagtcgatgttggctgagcgtggcgtgcaggtgcggcgtgccgcatcggcgaatgtgggcggtaacgctttcgataaggcccagtatcgtgcagggttgtcgtcggaggtgcaggttcaccgtgttgaggctgtggcgaggattggcaccacctataagggtgggaagcgtattgaggcgaagcatggcacgttggcgaggtcgattggggctgcgtcgtgatcgtttacggtgatccgcgtgtgtgggctaaacgtgtgctcaaggatgatggctggctgtccgatataccgtgtactgggacggtgcctgacgatttcggcggtgatctgatttggttggcgttggatggtggcccgcagttgcatgttcgtgagcgtgtttttttgcgggtgaatgtgttttctgatatgccggatcgtgctatgtcgttggcgcgtcgtgttgaggctgtgctggctgatggtgttgatggggatccggtggggttttgtagccgttctactggccctgatttgctggttgatggtgcacgttttgatgtgtattcgcttttcgagctgatatgtaggcctgtcgaatctgagtaaacgtatttgttttctatattttgtttttgtttgattatttttgggggttgtgatggctgcaacacgtaaagcgtctaatgttcgctctgctgttactggtgacgtctatattggtgacgctcacgccggtgacactattgatggtgttgggaagattcctgacggtcttcccgctttagggtatttgtcggatgacgggtttaagattaagccggagcgtaaaacggatgatttgaaggcttggcagaatgcggatgttgttcgcactgtggctacggagtcgtctatcgagatttctttccagctgatcgagtctaagaaggaggttatcgagctgttttggcagtcgaaggttactgccggagccgattcgggttcgttcgatatttctcctggtgccaccactggcgtgcacgctttgttgatggatattgttgatggggatcaggttattcgctactatttccctgaggttgagttgattgatcgtgacgagattaagggtaagaatggcgaggtttacgggtatggtgtgacgttgaaggcttaccctgcccagattaataagaagggtgatgcggtgtctggtcgggggtggatgacggctttaaaagctgatactcctccttctcctaagcctcagccggatccgaatccgccgtctaataactgatacacgattttaggggattgttgatagatgagtgacactggtttcacgttgaagattggtgaccgtagctgggggttggcggatgcggaggagacggctcaggctgttcctgcccgcgttttccgtcgtgcggctaagattgctcagtcgggggagtctgcggatttcgcccaggttgaggtgatgttttctatgttggaggctgccgccccggcggatgcggtggaggccctggaggggcttcctatggttcgtgttgctgagattttccgccagtggatggaatacaagcctgaccagaaagcggcctctctgggggaataatttggctccacggcctgattgatgattatcgtggggccatcgaatatgattggaggacccggttcggttgctcggtttatgatgttggtggcccggtgatgtgttggggtgaggcggtccggctggctggcgtgttgtgtaccgatacgtctagccagttggcggcccaccttaatggttggcagcgcccgtttgagtggtcggagtgggcggtgttggacatgctggatcattacaggtctgctaatagtgaggggcagccggagcctgtggcgaggccgacggaggagcgcagggcgaggtttacgtctgggcaggtggacgatattttggcgcgtgtccgcgctagtggcggggtgtctcgcgagattgatgtgttggggtgaatagtgtatgtctggtgagattgcttccgcatatgtgtcgttgtatacgaagatgcctggtttgaaggctgatgttggtaaacagttgtcgggtgttatgcctgcggagggtcagcgttctggtagtctttttgcttccgggatgaagttggctttgggtggcgcggcaatgatgggcgccatcaatgttgccaaaaagggtttgcggtcgatttatgatgtgactattggtggcggtattgctagggcgatggctattgatgaggctcaggctaagttgactggtttgggtcacacgtcgtctgacacgtcttcgattatgaattcggctattgaggctgttactggtacgtcgtatgcgttgggtgatgcggcttctactgcggcggcgttgtctgcttcgggggtgaagtctggcgggcagatgacggatgtgttgaagactgttgcggatgtgtcttatatttcgggtaagtcgtttcaggatacgggtgctatttttacgtcggttatggctcgcggtaagttgcagggcgatgacatgttgcagcttactatggctggtgtgcctgttctgtctttgcttgctaggcagacgggtaaaacgtcggctgaggtgtcgcagatggtgtctaaggggcagattgattttgccacgtttgcggctgcgatgaagcttggcatgggtggtgctgcgcaggcgtctggtaagacgtttgagggcgctatgaagaatgttaagggtgccctgggttatttgggtgccacggctatggcgccgtttcttaacggcctgcggcagatttttgttgcgttgaatccggttatcaagtctatcacggagtctgtgaagcccctgtttgcgtcggtggatcaggggattcagcggatgatgccgtctattttggcgtggattaaccgtatgccgggcatgatcactcgaatgaatgcacagatgcgcgccaaggtggagcagctgaagggcatttttgcgagaatgcatttgcctgtccctaaagtgaatttgggtgccatgtttgcgggtggcacggctgtgtttggtattgttgctgcgggggttgggaagcttgttgcagggtttgccccgctggcggtgtcgttgaagaatctgttgccgtcgtttggtgctttgaagggtgccgccggggggcttggcggcgggtttcgcgccttgggtggccctgtcgggattgtgatcggcttgtttgctgccatgtttgctactaacgcccagttccgtgccgcggtgatgcagcttgtgggggttgttggccgggctttggggcagattatggtcgctattcagccactgttcggggttgttgctggcgtggttgccaggttggcgccagtgttcggccagattatcggtatggttgctggtttggctgcccggctggtgcctgttattggtatgcttattgcccggctggttcctgttataacccagattattggtatggtaacccaggttgctgccatgttattgcctatgctgatgccggttattcaggctgttgttgctgtgatacggcaggttattggtgtgatcatgcagttgatacctgttttgatgccggttgtgcagcagatttttggtgctgtcatgtctgttctgccgccgattattggtctgatacggtcgctgataccggtgatcatgtcgattatgcgtgtggtggtgcaggttgttggtgccgtgctacaggtggtggcccgtattattccggttgtgatgccgattgtgacagctgtgatcgggtttgttgcacgtattcttggcgctattgtgtctgctgcagcccggattattgggactgtcacccgtgtcatttcatgggttgtgaatcatttagtgtctggcgtgaggtctatgggcacggccatcttgaatggctggaatcatattagagcgtttacgtctgcgtttattaacggtttcaagtcgatcatttctggcggcgtgaacgcggttgtggggttttttgcccggcttggtttgtcggttgcctcccatgtgaggtctggttttaacgcggctcgtggtgctgtttcttctgcgatgaatgctatccggagtgttgtgtcttcggtggcgtctgctgttggcgggtttttcagttcgatggcgtctcgtgttcgtagtggtgctgtgcgcgggtttaatggtgcccggagtgcggcttcttctgctatgcatgctatgggctcggctgtgtctaacggtgtgcatagtgtgctggggtttttccggaatttgcctggcaatattaggggcgccttgggtagtatggggtccctgttggtgtctgctggccgtgatgtggtggccggtttgggtaacggtattaagaatgctttgagtggcctgttggatacggtgcgtaatatgggttctcaggttgctaatgcggcgaagtcggtgttgggtattcattccccgtctagggtgtttcgtgaccaggttggccggcaggttgttgccggtttggctgagggtattactgggaatgctggtttggcgttggatgcgatgtcgggtgtggctggccgtcttcctgatgcggttgatgcccggtttggtgtgcggtcgtctgtgggctcgtttaccccgtatggcaggtatcagcgtatgaatgataagggtgttgtggtgaatgtgaacggcccgacgtatggggatccgaacgagtttgcgaagcggattgagcggcagcagcgtgacgctttgaacgcgttggcttatgtgtgattgggggtgtggttcatgtttattcctgacccgtctgatcgtgccggtttgactgttacttggtctatgttgccgttgattggtaatgatccggagcgtgtgcttcatttgacggattatacgggtgcgtctcctgtcatgttgttgaatgattcgttgcgcggcctgggtgtgcccgaggtggagcatttttctcaaactcatgttggggtgcacggctcggagtggcgcgggtttaatgtgaagcctcgcgaggtgacgctgccggtgctggtgtcgggtgtcgacgaggatccggtgggcgggtttcgtgacggttttttgaaagcctatgacgcgttgtggtctgcttttcctccgggcgaggagggggagttgtcggtgaagactcctgccggtgttgagcgtgtgctaaaatgccggtttgattcggtggatgacatgtttacggtggatccggttaatcgtggctatgcgcgctatctgttgcatttgacagcctatgacccgttttggtatggggatgagcagaagtttcgtttcagtaacgcgaagttgcaggattggttgggtggcagccctgtcggcaaggatggtacggcgtttcctgtggtgttgacgcctggtgttggttctggttgggataatctgtctaacaggggtgatgtgcctgcgtggcctgtgattcgtgttgaggggcctttggagtcgtggtctgtggagattgatggtttgcgggtgtcttcggattatccggtggaggagggtgagtggatcaagattgatacggatactcggcagcagtctgcgctactggatgggtttgaggatgtgatggatcgtttgacggagtgggagtttgcgtcgattccgccgggtggttcgaagagtgtgagtattgagatggttggtttgggtgccattgttgtgtcggtgcagtacaggtttttgagggcttggtgaatggttgatggctggtcttgttccgcagttaacattgtttacaccggattatcgtcgcgtggcgcctatcaacttttttgagtcgttgaaactgtcgttgaagtggaatggtttgtcgacgctggagttggtggtgtctggtgatcattcgaggcttgacgggttgactaggccgggtgcacggctggttgttgattatggtggtggccagattttttctgggcctgtgcgcagggtgcatggtgtgggtccgtggcgttcttcgcgggtgactatcacgtgtgaggatcatatccgcctgttgtggcgtatgttgatgtggcctgtgaaatatcgtcctggtttggtgggttcggagtggcgtgccgacagggaatatgcccactattctggtgcggcggagtcggtggctaagcaggtgttgggggataatgcttggcgttttccgcctggtttgtttatgaccgatgatgagagtcgtggccgctatattaaggattttaaggtgcggttccacgtgtttgccgataagttgttgccggtgttgtcgtgggctcggatgactgtcacggtgaaccagtttgagaatgcgaagtttgatcagcggggtttgctgtttgattgcgtgcctgccgtgacccgtagtcacgtgttgactgccgagtcgggttcgattgtgtcgtgggagtatgtgagggatgccccgaaggctacgtctgtggttgtgggtggccgcggcgagggtaaggatcggctgttttgcgaggatgttgattcgatggccgaggatgactggtttgatcgtgtcgaggtgtttaaggatgcccgtaacacggattctgagaaggtgtctctcttcgatgaggctgagcaggtgctgtccgagtctggggctacgtcggggtttaagatcgagttggccgagtcgaaggtgttgcggtttgggcccggcaggttgatgcccggtgatcttatctatgtggatgtgggttcgggccctattgcggagattgtgcggcagattgatgtggagtgtgattcgcctggtgatggttggacgaaggtgactcctgttgctggggattatgaggataatccgtcggccttgttggctcgccgtgtggctggtttggctgccggtgtgcgggatttgcaaaagttttgacaagtgattggggtttgttgtgggtattgtgtgcaagggttttgatggtgtgttgaccgagtatgattgggctcaaatgtctggtttgatgggtaatatgccgtctgtgaagggtccggatgattttcgtgtgggcacgacgattcagggtgccacagtgttgtgtgaggttctgccggggcaggcttgggctcacggggtgatgtgcacgtcgaatagtgttgagacggtgacagggcagctgcctggccctggcgagacccgttatgactatgtggtcctgtctcgggattgggagcagaatacggccaagttggagattgttccgggtgggcgtgctgagcgtgcccgtgatgtgttgcgtgcggagcctggcgtgttccatcagcaactgttggcgacactggtgttgtcgtctaacgggttgcagcagcagctggataggcgtgctgtggcggctcgtgtggcgtttggtgagtctgcagcctgtgatcctacccctgtggagggtgaccgggtgatggttccttcgggggctgtgtgggctaaccatgccggcgagtggatgctactgtctcccaggattgggacgggttcgaagtcgatcatgtttggcgggtctgctgtgtatgcttacacgatcccgtttgcccgccagttcagtagtccgccggttgtggtggcgtctatggctacggcggctgggggcacgcagcagatcgatgtaaaagcctacaatattactactgtctc

SEQ ID NO: 52 - DNA, 12018 bp, Pahexavirus sp.
  source 1..12018: mol_type = genomic DNA
caagccgatcacaatcccgacagggccacccagggcgcgaaacacgccgccaagcccgccagcggcacccttcaaagcaccaaacgacggcagtagattcttcaacgacaccgccaacggggcaaaccctgcaacaagcttccccacaccggcagcaacaataccaaacactgcggtgccgccagcaaacatggcacccaaattcactttagggacaggtaaatgcaaccttgcaaaaatgcccttcaactgctcaaccttggcgcgcatctgtgcattcattctcgtgatcatgcccggcatgcggttaatccacgccaaaatagacggcttcacccgctgaatcccctgatcaaccgacgcaaacatcggcttcacagaatccgtcaccgacttgataaccggattcaacgcagcaaaaatctgccgcaacccattaagaaacggcgccatagccgtagcaccaagataacccagggcacccttaacattcttcatagcgccctcaaaagtcttaccagacgcctgcgcagcaccacccatgccaagcttcatcgcagccgcaaacgtggcaaaatcaatctgccccttcgacaccatctgcgacacctcagccgacgttttacccgtctgcctggcaagcaaagacaacacaggaacacccgccatcgtaagctgcaacatgtcatcgccctgcaacttaccgcgagccataacagacgtaaaaatagcgcccgtatcctgaaacgacttacccgaaatataagacacatccgcgacagtcttcaacacatccgtcatctgccctccagacttgacaccagaagcagacaacgccgccgcggtagaagccgcatcacccaacgcatacgacgtgccagtcacagcctcaatagccgaattcataatcgaagacgtgtcagaagacgtgtgacccaaaccagtcaacttagcctgggcctcatcgatagccatcgccctagcaataccgccaccaatagtcacatcataaatcgaccgcaaaccctttttggcaacattgatggcgcccatcattgccgcgccacccaaagccaacttcatgcccttagcaaacaggctacccgaacgctgaccctccgcaggcatcaccccagaaagctgtttaccaacatcacttttaaggccgggcatcttcgtatacaacgacacatatgcagaagcaatctcaccagacatacactattcaccccataatattaatcccgcgagacaccccgccaccggcacgaacacgcgccaaaatatcgtccacctgcccagacgtaaaccgagccctacgctcatccgtcggcctcgccacaggctccggctgcccctcactattagccgacctgtaatgatccagcatgtccaacacagcccactcgcaccactcaaacgggcgctgccaaccattcaggtgggccgccaactggctcgacgtatcggtacacaacacgccagccagccggacagcctcaccccaacacatcaccgggccaccaacatcataaaccgagcaaccgaacctggtcctccaatcatattcgatggccccacgataatcatcaatcaggccgtggagccaaactattcccccaaggaggccgctttctggtcgggcttccattccatccactggcggaaaatctcggcaacacgaaccataggaagcccctccagagcctccaccgcgtcagctggggcggcagcctccaacatagaaaacatcacctcaacctgggcgaaatccgcagactcccccgactgggcaatcttagcggcacggcgaaacacgcgggcaggaacagcctgcgccgtctcctccgcatccgccaacacccagctacggtcaccaatcttcaacgtgtaaccagtgtcactcatctatcaacaatcccctaaaatcgtgtatcagttatcggacggcggattaggatccggcttcggcgaaggaggaggcgtcggaggagtatcagcttttaaagccgtcatccacccccgacccgacaccgcattaccagtcttattaatctgggcagggtaagccttcaacgtcacaccatacccgtacacttcgccattcttacccttaatctcgtcacgatcaatgagctcaacctcagggaaatagtagcgaataacctgatcgccatcaacaatatccatcaacagggcatgaaccccggtggtggcgccaggagaaatatcgaacgaacccgaatcggctccggcagtaaccttcgactgccaaaacagctcgataacctccttcttagactcgatcagctggaaagaaatctcgatagacgactcggtagcaacagtgcgaacaacatccgcattctgccacgccttcaaatcatccgttttacgctccggcttaatcttaaacccgtcatccgacagataccctaaagcggtaagaccgtcaggaatcttcccaacaccatcaatagtgtcaccggcgtgcgcgtcaccaatataaacgtcgccagtaacagcagagcgaacattagacgctttacgtgtagcagccatcacaacccccattaaatatcaaacaattacattaaaacaaaaacaaatacgtttactcagattcgacaggcctacatatcagctcgaacagcgaatacacatcaaaccttgcgccatcaaccagcaaatcagggccagtagaccgtttacagtacaccacagggtcaccatcaacaccgtctgcaaggacagcctcaacccgcctggctagcgacatagcacgatccggcgtatcagaaaacacgttcacccgcaaaaacacctgctcacgcacatgcaactgcgggccaccatccaacgccaaccaaataaggtcaccctcaaagctatccggcactgtccccacacaaggtatatcggacagccagccatcatccttgagcacgcgtttagcccacttcctggggtcatcgtagacgatcacgacgccgccccaatcgacctcgccagcgtgccatgcttcgcctcaatacgcttcccacccttatatgtagtgccgatacgggccacagcctcaacacggtgaacttgcacctctgacgacaaaccattacggtattgggccttatcgaaagcgttaccgcccacattcgccgaggccgcacgcctcaccctttcgccacgctcagccaacatgccctgcaccccagaagacttcaacacctcacgaatacccggcaagttcagcttcacattcacatcctgagccacaatctatcagcccttcttacgcttcaccttaacctgcgtgcccgcatcccagccagacatcggatgatgccacaccataggagacccgtcagcctcccacacaacaccccgaatacgccacctgcaacgataaccggcacccttgacaggctgcttgaaaagcatcgaccaatgctcataatccgagtcacgccccgcggcctcatcctcctgcgaaaaagaagcataaacggccacatgatgaaacacagtctcgacaggcttagaccaatcctcaaccttgtcaccaagatcatcgacacgaacagtcggttgaagcatctcaaccgtttcaccataaggaaaactggtcatatcatatctcccacaaagggccagcgtagccgttaatatcagatccgcacgagcaaccctcaccccacacagtagaacacacctcagaatgattcacactactcctcattgtcggtgtaatagtgaacgctttaccagccccaccatcacccttacacagcttcttcaacgcagcaatctcagaaggccacaacaaattcgtgggagtattagaccgtgtagtctgagcgaaagggcccgcagactcgtactgcacctgacccgacacgccagtatcattccagcgcaacaaagccctacgcagaatagccttagcggcatccttgtatttgaaatccggtttagcgatacagggggcgacactgacagccacagcctccacatcggcaatcatcgcctcaagcttcccctcaggaatatcggcgaaaggctcaatatcctcaggcttcaaaatgatacccatcaacaccaccccctgcacacagcataaacattatcgcaacaaatgaatcagttaccggccggcggattaggcttcggggcagccttctccttcacaacagcaaacgaatcaagcgactcgatagccacatacaggacagcctcggcacgaaccataacctcattatggcccttcaggtcacggccagtctgatccgggtcaccatactcgatcagctcgatcgggaagttacgctggaacccccaatgaacacgagagaaatcacccacaatagccttaacaccagaggcaggcgacatctccggggcgccagaaacagtcgaagaagcaccaacattcagaccgcgccaattatccaaaccagcaaacccggcggcaggatacataggctggccggcaagcggagaccccttcggatacacctcagtagacagggcaaacgagaacgccggatccaaagcaaccccgttaggaacctgcaaaccagcaccagcgataagaccgacagccttaacaagatcagtcgtagcagaatccgtagcatcaaccgtcttcgacgtcttatccagcgacaccttgacagccgcggcaggcttaccagtagcaggatcaataccatggaaagcaatcagatccacggcgcgaccaatcgaagcaccaagagcaggggaaatcagatcccgcaaaacacccaggcggtaatcggcgtcagcccacataaactcgtccgagacacgctgctgagtcacaaccttgataggctgcgcagtaaacgaggaaacatcaacgctagcggaaggcttaacctcgccctcaccaacaatcttggcgcgaggaacaccactaaacacggcacccttaacagggccaaaaatagtcggctgctccggcgaaagcttcgccaaaacaccagaatcgatagcacggtcacgaaccgcaccaatcatagaaccaggaagctcaagcttccctgcagaaagaaaatcgtcagccatcacaaatcatctcctagaattattgacaagagcatccacaaacgcgacaccctcacgtcgtttaacatcatcaacgggggcactccccgcaagacggcgcacacccgcgccaccactactatggtcgatcaaacccttcaaagctttcgcagactcggcaagcgactccttatcgccacccgacaagaaagcgatcgcatcactggacaaaccatactctgaagccacctcgcgcttcacaccctcaagaacaaacccattgatcctgtcttcgagttcctcattcttgcggcgaagctcatcaatagtagatccagaatcgtcactcgatgcacgaagcttctccaactcggcgaaattacttttagcacgagactcccacttacgggcctcagccttccaatccgtgccagaagaagactcctccttcacggaaacatcaccggcatgatcatcgccggcagcctgcccatccttcacaacatcaacaatgtcctcgccctttccgggctcaacagcatcattgtcaacactctgttcttcaacactctgatcggccatagcctaaccctacactccttgcggaaaacaacacaacattgttgacccccgtgcgggagacaaccctgtgcaccgataaccggcggcacacaaccggaaaccacatcaaattatcgcatatcgccaacagtacgcatagccttcaaaatattgccaggcgactgctgcaacccgtgatcatcaacccattcacgagccttctcataaacccgctgatatgcggtgtccgcagagctgggctcccaacgcccaacaacctcaaccaccgtacaaccacaatgatcatgatacttcgaaccaaacggacgcttaccaccacgcttatgacgccgcgtatgaccagtagtaagcgcccgctcccgagtcgtataatccgacctcgtagccaacatggcacaaaacgcgcacggatcaccatcagtcaccctgcgccacgacctgccctgcgcacccgccgaccactcaaccgtgtcacggccagcattcatgacagcccgatcaaaacccgcagccatcgcatcaatcgtgtcattcgccctatccgggtcactcgcaagaatcttcatagtcgaaaacgacctagccaacgcggcggcagcatcaaactcgtcatacacgatcaaacccggatccacaccattcaaccggcgaaaatccgacacaaacctggcagccaacgatgccgaaccatcatggccggcacgctccaactccacacacaaacgcacatactgcgcatctgtcatcttcccggaatgcctcaaacgaccaagctcagcataatagcccgcatacttcccggcaaacctgaccgcctcacgctgatactcagtcgcagcaagcctcgacatagcacccgaagccatcgcctatcaaacctcgttagtctgacgagaaatagccccagccagcgccgccaacggatccgaagactcggcacgatgccgcatcacagcctcaacctgcacatcatccaaacccaacatctccaacaccgtacgagaatcagcaggcaaaataccggcgccaacaagcttcgtcacagcatcagccgtagccgcccgagtcggggttgaagcatcacgccaacgcaaaccaacatcaccgaaaaacgcggcctcatcaacactcgaatcaagcgccttagcagccaggaaaccgaccgacagccagccctgaccaaacgacgtttgacgccgctcagcacgcttcacaagcctcgactcctccgccgcaagcgcctcacccgaaggcgggttagacgtaataaacccgaaatagcgttccggaacagcagcctccccagcagtcaactgggccaacagccgcatctgatccgaatacggtgtaggactattgacaggaaacgaccccacattcggagtatcaccgtcatcatccttatccacagcccacacagaagccatcgacaggacccagccaggctgcgaaaactcgtcagccgacacacccgtaacccacctttgcggataggcatagaagtcacgattcacagactgccccaacagtgtgcgcacagcctcatccgtgtaggcacgaatcgaccgagtaatctccgaacggccatcaatcctagaagtacggcgacgattcacaacaggcaccaacggaaccgcacccaacacattctcgatacggcccgtctcaacccactcgcgagacccacgccgctccacctgaacaatcacatcaggcagcaacaactccgcctcaaccacctcaggatcacacgtctgctgcaccacaaggccagcatccaaacgagacccgtcagccgaaaacttgcccgtacaattctttggtgactgcggacgagcagaaacagtgccatcaccaccaggaatgatagccacaaacgacaacccaaaaatcagcgcatccaaatgcacatcacacgacgccgtagcaagccgattcgcagcatacacaccatccaagccgtagccgtcaccattcgtccagccaagccaatccagacgctcctccaaagcatccacagctataccaggccacgacaccaccgtctgcacacgctgcaactccggaggaatagccacccccaaatcacgcacccggctagagccctcatagtagccctcaatacgacaatgccacgaagacaacctttgaatacgatcgtacatgccctcaatcagagccaactcatccgagttcataccacagacacccgcttcctaccagaccgttcacgccgcttcgctttcgccatcttcgcaccaagatacgccaaagacacagcctccaaaggaacctcagaaccatccttagacgaggaaccccaaccccacgcagaacccttcttcttctgcacagccgacctcacagcaatctccaacatgtcacgcctcgaatcagccctagggtgagaaaccacaccagaccttacaccttccaagaaggcttgacacgcctccacataagtgccagtatcagcaacaatcacgccacggcccggaacaccacgatccgtcaacgccttctgcaacaacaccgcaccagacccggcaaccatgatcttttcagtgtcaccccaacgcaacgccaaccagtcagccagctggcccacaccatcaacaatcgtgccagacaggccatcaataacctcaacatgaaccccagcatcagtccggccagcacccgccaacgcgacacgatctcccgagcgagaaaacgagacaccaaaaaccttcccgccaacaaggctcgcctcacccacagccgactgtacccacttatcagccggaatcacagacgtagcagactggccacgatcccaccagccaagccgctcccgagcaaacccggcagcagacatcgactcatgctcatcgcttacggtcccaaaattcaggcggcgacccaacgccggattagtgtcacccgccaacttccgccactgccgcgacacatcatccggatcagactcgtcaggaatcgaaaactccgcccacgcaaaccttttaccacccgacaaagcctgcccacgcaaacgcaacaccacagacccgtcagccaacggcccaggcggcgtgcccaaaaaaatctgctgcggatcaccagacggggcagcactcaccgtaggaagcaaagcctccaactgctcatccgacaactcctgagcctcatcacacaccaaatcatcaaccgtaaaaccgcgagcagaaccacgagaacgagccacaaactcaaccgaaccccaaccgctgcagccacacttctcctcaaaagtcggacaatccggatgatgcaacacaatagcctcctgaccattcgtcgcacgaatagccttcaccatacgagccaaatccggatagcggcgctcattctcaaaaaacgaccgcaaacgcataaacgccttacgagccgacttcaactcgtgagccgtatgcaaaatacggcgaccctgaaccaccatcttaaaaagctcaacaacctcaagaatagcgttcttcccgttctggcgaggcacaaacaccccacacacacccgcagcaagccgaccggtagaagcaaccgccagccaatcatccaacacctgccgctgccacggatcaggcgtcaacccatacgcagccccaagagcaccagcatcattgccggcagtcacctgatacgcagcagccacacgatgacgaggaacctgagaacccacaacaccagacacctaatcaggcccccttgcgcttcctataccggtcaatcatcgccaccgcagatcccccaccacggccaccagacaccacatcaaccgaataccgatccaacatgcccataaaagccttcacatgagcacgaagcgaagccaccaaatccgcgcgaccctcacgccacaccacatcgtgaatcaccgcagcatcaaggagaaataaccactcctcatcagacacaaacccagcacgcggatcctcaccccacacacgccaccaacgacgcgtctcctcacaccaatcacgaccaccatgaagctcaggctgcaccacaaccaccaccaacacaaaaagtcgacaaacagacaaatccacaaaagggaggtatttcactaagccgtatgaggtcttgcacgcctgtgcagggggtgtccccggcgggggttggcgggtttttcaccatggaatcaatgtttttgtggtttgttgttggaacttgatgtttggttcgctgcgattgcctttgcttctgttgcatgttctgcagatgatttgcccgttgtctagggtgttgagtcccccggggctgacgggtgtgatgtggtcggcttcggggctggttggcaggtcgtgtgtgtcccaggctatctgggctccgcagagtgggcattcggtttggccttgttgtcgggcttgggtgatgagtcttgctcgccagcgccggtgggcttggctggctgtgcggttggtgcgtgccatgatgtgtctattcctagcctagccctgtacgggtcttgtttgcccctctagcggcctgggaaccgttgggggtatgaatactctgcccttgccctgctagtcgattctgggggctgttttgtttgtttgagggggtgttctgttgatggtggggtggttgttttctccactacccccaggggtgtgaaaaagatcacatcgccccccagctgtgtcaaaaagagaagaacacggaagaaaaatgggggtgagtgtgtgttagcacttccaggcttagcgcttagcgcctagcggtgtaggacacagccaaaacgtgtacacctttaaagtttttaaagtcttctacatataatatacactttaaatcttacccagtgttaagggtgttggcgtgacacgccgtacgccttcagccgaacacgctaagccgtaaagggacacgggtgtaagagggtggggagtgtgcgatgggagcttgcgaccaagcacacgagtcacacggcgaaaagctcatcagcgttaacggttaaaggttcctcttctcccctgatgaagaaaagaagagaagagagaaagaaccaaagagagtagagaagtaaagaagttaaccctttaactcttctaaaacttttataacttataagctttaagacttataggttataatattaaagtttaagactgatggttaactttaagtacttaaggtctttaatgttttatagttactttaagtgtttaaaacctataagcctttaagtcttaatagttattttaagttttaaagtcttaaacactgatgtgaagtttatatccttaagtgctaagcctttaaggttttatacttaacttagatgttaaggtctttatactgatgctgagccttgaagggctcagtgctaagtgtgtaagcctttaaggttattaattaactttaagtgctaagctcttaagtttacttaaagtgtttaaggccttaagactgatgccgagcccttgaggggctcggtgctaagctatcagcaccttagcgctaagcccttaggtctttaagtctttggtagactgatggatgtaagggtgaaagccgcgtcagcggatttcggccttgcgtccagctggctacctgtccagcctatcatatgccacctgggataagtcaaactggtggatttggctctataggcgggtttgaggggtgtaaacgggtgtttttggtagtaaaggtccaaaaattaaacctaaacttttccttaaattttcttagagtcttgtaacctttgagggttgtgaaggctgaaacccctagtcagaacgggtttcactcccggacagctgtcacaccttgacccgtgtcttttccgaacacgctaggcccatcagtgctgaggatgttccctcaggctttcgagtactcgtcgctgaagctcctcgtactctcaagccttccctgatggcgtgtacccctttcaggactgtgcctgatcggctgagcctgctcgggctgtcaggctgatgccgagcccttgaggggctcggtgctcagtgctaagtctctaaggttaattgaagtaccttaggttgaaggctgatgctcccccttctttcttgtaccgtgtccttcttcccccacagtatccaacactgtccacatagtgtaggcttagctaagcaggatggggactgatggtctgcatctggagagcggattgcgtatcagtctcctggaggcgtctagaatcgatcagaatgtgcttgggggtatgaataccttgcccccaccctgcaaggcgctcctaggcgtacccctgaagctttaaacggtatttctgggctacacccttcacgccagatcggcagggtggccttgagggtgcacaccaagccaggaggatgtgatacatctcacacagtatgagggctg

SEQ ID NO: 53 - DNA, 12826 bp, Pahexavirus sp.
  source 1..12826: mol_type = genomic DNA
acacctgctcagcctcgtcaataagatgcaccttctcggaatccgtgttacgggcatccttaaacacctctacacgatcaaaccactcccccccagacaagctatcaacatcctcacaaaacagcctagccttgccctcgccgtggccacccacaaccaccgacgtcgccttaggggcagccctcacatactcccacgacacaatcgaacccgactcggcagtcaacacatgcgtccgggtcaccgccggcacacaatcaaacaacaaaccacgccgatccagcttcacattctcaaactgcttcaccgtgacagtcatccgagcccacgacaatatcggcaacagtttgtccgcaaacacgtgaaaccgggcctgaaaatcattaatgaaccgtccacgcttctcatcatcagtcagaaacacatccggcggaaaccgccaagcattatcccgcaacaccttcttcgccaccgactccgccggacccgaataatgggcataatcccggtcagcacgccactccgaacccacaaaactaggacgataattgataggccacatcagcatacgccacaacaggcggatatcatcctcacacgtcacagtcaccttcgaggactgccaaggcccaaccccgtgcaccttacgcacaggccccgaaaaaatctggccaccaccataatcaacaaccagccgcgccccaggcctagtcaacccgtcaagcctcgaatgatcacccgacaccaccaactccaacgtcgacaaaccattccacttcaacgacagtttcaacgactcaaaaaaattgataggcgccacccggcgataatccggtgtaaacaatgttatctgcggaacaagaccagccatcaaccactcaccaagccctcaaaaaccggtactgcaccgacacaacaatggcacccaaaccaaccatctcaatactcacactccgagaaccgccaggcggaataggcgcaaactcccactctgtcaaacgacccatcacatcctcaaacccgttcaacaacgcagactgctgccgaggatccgtatcaatagtaatccaatcatactcctcaaccggatagtccgaagacacacgcaaaccatcaatctgcacagaccacgatgacaacggcccctcaacacgaatcacaggccacgccggcacgtcacccttattagacagattatcccaacctgaaccaacacccggtgttaacaccacaggaaacgccgtgccatccttgccgacagggccgccacccagccaatcctgcaactttgcgttactgaaacgaaacttttgctcctccccataccaaaacgggtcataggctgtcaaatgcaacagatagcgggcatagccacgattcaccggatcaaccgtaaacgtgtcatccaccgaatcaaaccggcacttcaacacacgctcacgaccggcaggagtcttcacagacaactccccctcctcgccgggaggaaacgcagaccacaactcgtcatacgccttcaaaaaaccgtcacgaaacccgccatccggatccgggtcaacacccgacaccaacaccggcagcgtcacctcccgaggcttcacattaaacccgcgccactccgaaccgtgcaccccaacatgagtttgagaaaactgctccacctcaggcacacccaagccgcgcaacgaatcattcaacaacatgacaggagacgcacccgtataatccgtcaaatgaagcacacgctccggatcattaccaatcaatggcaacatagaccaggtaacagtcaaaccagaacgatcagacgggtcaggaataaacatgcacaacactcccctatcacatgtaagccaatgcgttcaaagcgtcacgctgctgccgctcaatccgcttcgcgaactcgttcggatcaccataggtaggcccgttaacattcaccacaacactctcacccttggcacgctgatacctaccatacggggtaaacgaacccaccgacgatcgcacaccaaaccgggcatcaaccgcatccggaagctgcgaagccacaccagacatcgcatccaacgccaaaccagcattcccggtgatcccctcagccaaaccggcaacaacctgccggccaacctggtcacgaaacaccctcgacggggaatgaatacccaacacagacttcgcagcattagccacctgagaacccatattacgcaccgtatccaacaggccactcatagcattccggataccattacccaaaccagacaccacatcacggccagcagacaccaacaaggaccccatattgccaagcgcacgccgaatattgccaggcaaattccggaaaaaacccagcacaccatgcacaccactagacacagcggaccccatagcatgcatagcagaagaagccgcactccgggcaccattaaacccgcgcacagcaccactacgaaccccagacgccatcgaaccgaaaaacccgccaacagcagacgccaccgaagacacaacactccggatagcattcatcgcagaagaaacagcaccacgagccgcgttaaaaccagacctcacatgggaggcaaccgacaaaccaagccgcgtaaaaaaccccacaacagcgacaacgccgccagaaatgatcgacttgaaaccgctcataaacgccgacgtaaacgccctaatacgattccagccattcagtatagccgaacccatatgcgccacaccagacaccaaatgggccacaacccatgagacgacacgggcaacagcagcaatcacacgggccacagccgacacgacagcaccaacaatacgggcaacaaaccccaccacagccgccaccatcggagccaccacagcaagaatacgggccaccacctgtatcacaaccgaaacaacctgcaccaccacacgcataaccgccgcaatcacaggcatcaacgaccggataagaccaataatcggcggcagaacagacatgacagcacccaaaatctgttgaatcacaggcatcaaaacaggcaccaactgcatgatcacgccaacaacctgccgtatcacagccacaacagcctgcaacaccggcataagcgcaggcagcaacattgccgcaacctgtgtcaccgcaccaataatctgggtgataacaggcaccagccgggcgacaagcatactaatcaaaggcaccagctgggcagccaaaccggcaaccaaaccaacaatctggccaaaaactggagccaactgtgcaaccagcccagcaaccaaacccaacagcggctgaatagcggccataatctggcccaacgcctggccaaccacagccacaagctgcatcaccgcggcacggaactgggcgttagtggcaaacatggcagcaaacaagccgatcacaatcccgacagggccacccagggcgcgaaacacgccgccaagcccgccagcggcacccttcagagcaccaaacgacggcagtagattcttcaacgacaccgccaacggggcaaaccctgcaacaagcttccccacaccggcagcaacaataccaaacactgcggtgccgccagcaaacatggcagcaagatttactttagggacaggcaaatgcattctcgcaaaaatgcccttcaactgctccaccttggcgcgcatctgtgcattcattctcgtgatcatagccggcatcttattgatccacgccaaaatagacggcatcatacgctgaataccagcatcgacggcagcaaacatcggcttcacagaatccgtcaccgacttgataaccggattcaacgcaacaaaaatctgccgcaacccgttaagaaacggcgccatagccgtagcaccaagataacccagggcgcccttaacattcttcatagcgccctcaaacgtcttaccagacgcctgtgcagcaccacccataccaagcttcatcgcagccgcaaacgtggcaaaatcaatctgccccttcgacaccatctgcgacacctcagccgacgttttacccgtctgcctggcaagcaaagacagtgcaggaacaccagccatagtaagctgcaacatgtcatcgccctgcaacttaccgcgcgccatcacagacgtaaaaatagcgcccgtttcctgaaacgacttacccgaaatataagacacatcggcgacagtcttcaacacatccgtcatctgcccgccagacttcacacccgaagcagacaacgccgcagccgtagacgccgcatcacccaacgcatacgacgtaccagtcacagcctcaatagccgaattcataatcgaagacgtgtcagacgacgtatgacccaaaccagtcagtttagcctgagcctcatcaatagccatcgccctagctataccgccaccaatagtcacatcatagatagacttgaggcccttcttagcaacattgatggcacccaccatggcggcaccacccaaagccaacttcatgcccttagcaaacaagctacccgaacgctgaccctcagccggcataacacccgacaactgtttaccaacatcagccttcaaaccaggcatcttcgtatacaacgacacatatgcgcaagcaatctcaccagacatacactattcaccccataatattaatctcgcgagacaccccgccaccggcacgaacacgcgccaaaatatcgtccacctgtccagacgtaaaccgggccctacgctcatccgtaggcctcgccacaggctccggctgcccctcactattagcagacctgtaatgatccagcatgtccagcacagcccactccgaccactcaaacgggcgctgccaaccattcaggtgggccgccaactggctcgacgtatcggtacacaacacgccagccagccggacagcctcaccccaacacattatcgggccaccaacatcataaaccgagcaaccgaaccgggtcctccaatcatattcgatggccccacgataatcatcaatcaggccgtggagccaaattattcccccagggaggaacctttaccttcaggcttgtattccatccactcacggaaaatctcggcaacacgaaccatcggaagcccctccaaagcctccacagcatccgccggggcggcagcctccaacatagaaaacatcacctcaacctgggcgaaatccgcagactccccagactgggcaatcctggcggcacgacggaaaacgcgggcaggaacagcctgagccgtctcctccgcatccgccaacacccagctacggtcaccaatcttcaatgtgaaaccagcgtcactcatctatcaacaatcccctaaaatcgtgtatcagttatcggacggcggattaggatccggcttcggaggattcggggccggaggaggagtcggaggagtatcagcttttaaagccgtcatccacccccgaccagacaccgcatcacccttatggttaatctgagcaggatacgccttcaacgtcacaccatacccatacacctcgccatccttacccttaatctcatcacgatcaatcaactcaacctcagggaaatagtagcgaataacctgatcgccatcaataatatccatcaacagggcatgaacacccgtcgtggcacccggtgaaatatcgaacgaacccgcatcggctccggcagtaaccttcgactgccaaaacagttcgataacctccttcttcgactcgatcagctggaaagagatttcgatcgaagactcggtagccacagtgcgaacaacatccgcattctgccaagccttcaaatcatccgttttacgctcaggcttaatcttaaacccatcatccgacagataccctaaagcagtcaacccatccggaaccgtcttcacaccatcaatagtgtcaccagcgtgagctttaccaatatagacgtcacccgtaacagcagagcgaacattagacgccgtacgtgtagcagccatcacaacccacaaaaaacaatcaacaaaaacaataaaactaaaacaataaacaaatacgtttactcagactctacaggccgacacaccagctcaaacagcgaatacacatcaaaacgtgcaccatccactaatagatcagggccagtagaccgtcgacagtgcaccaccgggtcaccgtcaacaccatcagccagaacagcctcaacacgacgcgccaaagacatagcccgatccggagtatccgaaaacacattcaccctgagaaacacctgctcacgaacatgcaactcggggccaccatccaacgccaaccaaatcagatcaccgctgaaatcgtcaggcaccgtccccacacagggtatatcggacagccagccatcatccttaagcacacgtttagcccacttcctgggatcatcgtagacgatcacgacgcagccccaatcgaccgagccagcgtgccatgcttcgcctcaatccttttcccacccttataggtggtgccaatacgggccacagcctccacacggtgaacctgcacctccgacgacaaccctgcacgatactgggccctatcaaacgcgttaccgcccacattcgccgaggctgcacgcctcacacgctcgccacgctcagccaacatcgactgcaccccagaaggcttcaacacctcacgaatacccggcaagttcagcttcacattcacatcctgagccacaacccatcagcccttcttacgcttcacattgatctgcgtgcccgcatcccaaccagacattgggtgatgccacacgataggagacccgtcagcctcccacacaacaccccggatacgccaccggcaacgataaccggcacccacaacaggctgcttaaaaagcatcgaccaatgctcatagtcagagtcacgccccgcggcctcatcctcctgcgacacagtagaatagacggccacgttatggtacacggtttctataggatgcccccaatcctcaaccttgtcgccaagatcatcgacacgaacagccggttgaagcatcacaaccgtttcaccgtaaggaaaactggtcatatcatatctcccacaaagggccagcgccaccgttaatattcgacccgcacgagcaaccctcaccccacaccgtggaacacacctcagaatgtgcatatcgaccatgaatagcgggggtgatagtgaacgctttaccagccccactattcccctcacacaatttcttcaacgcagcaatctcagaaggccacaacaaattagtgggagtattagaccgtgtcgtctgggagaaaggacccgccatctcatactgcacctgacccgacacgccggtatcattccagcgcagcaaagccctacgtaggatagccttagcagcatccctatatttgaaatccggtttagcgatacagggggcgacgctgacagccacagcctccacatcggcgatcatcgcctcaagcttcccctcaggaatatcggcgaaaggctcgatattcttaggcttcataatgatacccatcaacaccaccccctgcacatagtacacattcgcttatcttgtatcagttatcggccggaggaggattcggtgcagccttctccttcacaacagtaaacgaatcaagcgtctctttagccacatacagcacagcctcggcacgaaccataacctcattatggcccttcaaatcgcggccagtctgatccgggtcaccatactcgatcagttcgatcgggaagttacgctggaacccccaatgaacacgagtgaaatcgccaacaatagccttaacacccgaggcaggcgacatctccggggcgccagaaacagtcgaagaagcaccaacattcaggccacgccaattatccaaaccagcaaacccggcggcaggatacatcggctgaccggcaagcggagaccccttcggatacacctcagtagacagggcaaacgagaacgccggatccaaagcaacaccgttaggaacctgcaaaccagcccccgcaatcaggccgacagccttaacaagatcggtcgtagcagaatccgtggcatcaaccgtctccgtcgtcttatcaagcgacaccttgacagcagcagcaggcttacccgtagccggatcaacaccatggaaagcaatcagatccacggcgcgaccaatcgaagcaccaagagccggagaaatcagatcctgaagcacacccagacggtaatcagcatcagcccacataaactcgtcgctcacgcgctgctgagtcacaaccttgataggctgcgcagtaaacgccgaaacaccaaccgaagcggaaggcttaacctcgccctcgccgacaatcttggcgcgaggaacaccactaaacacggcacccttcaccgggccaaaaatagtcggctgctccggcgacagtttagcaagcacaccagaatcgatagcacggtcacgaaccgcaccaatcatagaaccaggaagctcaagcttccctgcagaaagaaaatcgtcagccattataaatcatctcctagaattattgacaagagcatccacaaacgcgacaccctcacgtcgtttaacatcatcaacgggggcactccccgcaaggcggcgcacacccgcgccaccactactatggtcgatcaaacccttcaaagccttagcagactccaccagcgcttcacgatcgccaccgtgcaagaaagcgaccgcatcacccgtcaggccacactcggcagccacctcacgcttcacaccctcaagaacaaacccgttgatcctgtcttcgagttcctcattcttgcggcgaagctcatcaatagtagaccccgaatcaccatccgaggcgcgaagcttctccaactcagcaaaattacttttagcacgagactcccacttacgagcctcagccttccaatccgtgccagaagaagactcctccttcacggaaacatcaccggcatgatcatcgccggcagcctgcccatccttcacaacatcaacaatgtctccaccctttccgggctcaacagcatcattgtcaacattctgttcctcaacactctgatcggccatagcctaaccctacactccttgcggaaaacaacacaacattgttgacccccgtgcgggagacaaccctgtgcaccgataaccggcggcacacaaccggaaaccatcatctcatgtcgccaacagtacgcatagccttcaaaatattgccaggcgactgctgcaacccatgatcatcaacccactcacgagccttctcataaacccgctgatatgcggtgtccgcagaggagggctcccaacgccccacaacctcaaccaccgtacacccacaatgatcatgatacttcgaaccaaacggacgcttaccggcacgcttatgacgccgagtatgaccagtagtaagcgccctttcccgagtcgtataatccgacctcgtagccaacatagcacaaaaagcacacggatcaccatcagtcacccgacgccacgacctgccctgcgcacccgcagaccactcaaccgtgtcacggccagcgttcatgacagcccgattaacacccgcagccatcgcatcaatcgtatcattcaccctatccgggtcactattcatcatcttcatagtcgaaaacgacctagccaacgcggcggcagcaccaaactcgtcatacacgatcaaaccaggatcgacaccgttaagcttccgaaaatccgacacgaacttgcccgccatagctgcggaaccgtcatggccggcacgctccaactccacacacaaacgcacatactgcgcatctgtcatcttcccggaatgccacaaacgacccagctcggcataatagcccgcatacttcccagcaaacctgaccgcctcacgctgatacccggtagcagccaacctcgcctcaacccccgaagccatcgcctatcatacctcgttcgtctgccgggaaatagccccagcaagcgcagccaacggatccgaagattcggcacgatgacgcatcacagcctcaacctgcacatcatccaaacccaacatctccaacaccgtccgagaatccgcaggaagaataccggcaccaacaagcttcgtcacagcatccgctgtagccgcccgagtaggtgttgatgcatcacgccaccgcaaaccaacatcaccaaaaaaatcagcttcgttaacggaagaatcaagcgacttggcagccaggaaaccaaccgacagccagccctgaccaaacgacgtctgacgccgctcagcacgcttcacaagccgagactcctcagccgcaagcgcctccccaggtggcggattcgatgtgataaacccgaaatagcgttccggaaccgcagcctccccagccgtcaactgcgccaacagccgcatctgatccgaatacggcgtaggactattgacaggaaacgaccccacattcggggtatcaccgtcatcatccttatccacagcccacacagaagccatcgacaggacccagccaggctgcgaaaactcgtcagccgacacaccagtcacccacctttgcgggtaggcatagaagtcacgattcacagactggcccaacagtgtgcgaacagcctcatccgtgtaagccctaatcgcccgggtgatctccgaacgcccatcaatacgagacgtcctgcgccgattcacaataggcacaagcggaaccgccccaagtacattctcgatacggcccgtctcaacccactcacgagacccacgccgctccacctgaacaatcacatcaggaagcaacaactccgcctcaacaacctcaggatcacacgtctgctgcaccaccaaaccagcatccaaacgagacccatcggcagaaaacttgccggtgcaattctttggtgactgcggacgaaccaacaccgacccatcatcttgggggataacagccacaaacgacaaaccaaaaatcagcgcatccaaatgcacatcacacgacgccgtagcaagccgattcgcagcatacacaccatccagaccgtagccgtcaccattagtccagccaagccaatccagacgctcctccaaagcatccacagctataccaggccacgacaccacagtctgcacacgctgcaactccggaggaatagccacccccaaatcacgcacccgattagagccctcatagtagccctcaacacgacaatgccacgaagacaacctttggatacgatcaaacatgccctcaatcagagccaacttatccgagttcataccacagacacccgcttcctaccactacgctcccgacggccacgacgaacacgtttagcccccaaaaacgccaaagacacagcctccaaaggcacctcagaaccatccttaaacgaggaaccccaaccccacgcagaacccttcttcttctgcacagccgacctcacagcaatctccaacatgtcacgcctcgaatcagccctagggtgagaaaccacaccagaccttacaccctccaagaaggcttgacacgcctccacatacaccccagtatcagcaaccacaacaccccgaccaggtatgccacgatccgtcaacgccttctgcaacaacaccgcaccagacccggcaaccatgatccggtcagtatcaccccaacgaaccgccaaccagtcagccaaccggcccacaccatcaacaatcgttcccgacagcccatcaataacctcaacatgaaccccagcatcagtccggccggcgcccgccaaagcaacccgatccccagaacgagaaaacgagacaccaaacactttcccgccagaaagcttcgcctcatccacagcagactggacccacttatccgcaggaaccacagacgcagcagcctggccacgatcccaccagccaagccgctcccgagcaaacccggcaacagacatcgactcatgctcatcgctcacagtcccaaaattcaggcgacgccccaacgccggattagtgtcccccgccaacttccgccactgccgcgacacatcatccggatcagactcgtcaggaatcgaaaactccgtccacgcaatccttttaccaccagacaaagcctgcccgcgaagacgcaacacaaccgaaccatccgccaacggcccaggcggcgtacccaaaaaaatctgctgaggatcaccagacggggcagcacttactgtaggaagcaacgcctccaactgctcatccgacaactcctgagcctcatcacacaccaaatcatcaaccgtaaacccgcgagcagaaccccggctacgggccacaaactcaaccgacccccaacccgggcagccacacttcttaccacccacacgacaatcaggatgatgcaacacaatcgactcctgaccattcgtcgcacgaatcgccttcaccatacgagccaaatccggatagcggcgctcattctcaaaaaacgaacccaaacgcataaaagccttacgagccgacttcaactcgtgagccgtatgcaaaatacgacgaccctgaatagtcgccttaaacaactccacaatctccaagatagcattcttgccattctggcgaggcacaaacaccccacacacacccgaagcaagcctgccattaccacccacagcaagccaatcatccaacacctgctgctgccacggatcaggcgtcaacccgtaagcccgccccaactcgccagcatccccgccagcagacactgaatacgccgcagccacacgatgaccaggaacctgagaacccacaacaccagacacctaatcaggcccccctacgctgcctataccgggcaatcatcgccaccgcagcacccccaccacggccaccagacgccacatc

SEQ ID NO: 54 - DNA, 12184 bp, Pahexavirus sp.
  source 1..12184: mol_type = genomic DNA
atgttttccaccggtccacaagggggggccgtatatcatccaccaattgtagtctttcttgtgtggcccgcctgactcgcacatgtttttgcatattctgccggagggtttgatttcggtgccttctgattcggcgagggcgacttgggtgtcgaaaatgtttgtgcaggatgagagtttgtctggtagtgcagggaattcggcgggattgtacaggtgtaggtcgtattgttcggtgatgtggtgtatggcgcttccggcgatggtggcataccaggtgtggtgttgggcatggtagccgtgtgagaggcgccatttttcaccgcattcggcccactgagagagtgaactgtaggagatgtggcctgggtgattgatggttttcgggtattgtgctagaggcattacttgtcgcctttgtgggtgttccatgggttgcgggtgtctaccccggcatcgtgttgctggtaggcgaggagtgcgaggcagtgccaggcagcatgggccacgtggggtagcccggattcataatcgaggttgttgccttgctgccatgataacaggtgccggtagagggcgtcgacactgtggctccacggatagccgccggtctagttgttgtcgccgtatttggtggcaccgtatccggctacttcgcctagggcgtgcaaggctgtagggtcgatgagggatagcctgcagagtttcaattcttttcgggcaccggtgttggggtcggtgtatatgcgggtgggctcatccatggggtgtgtgctccttaggggtgggttactggttgttgttgtgggcgagtgctactgcgagaataatgatggcgagggtttctgcgatgaggatgggtgttgtgatcatttagtgtctcggggattgttggtgagggttgaggcgcctaggagggtggtgagggcgcatgcggcaatgatggcgagggcggctttgtggctggtgccggtggcgtacatccatgtgatgatgccgccttggatccatgccagtgtggtgaagaacgtttcgtagctgtgtagctcaatgttgttgggtgtgttcatgcttgctcctgaagaatggtgttgatggttttataaatgttgtacaggtcggtttcgatagatatcagttggtggatttcgtggtagagatcaatgtctgggttgagggtgttgatgcgggaggcgatgtcggtggctgtgcgtagtgtgccgccggtgtggtgaatgatgtgtgccgtgtcggcgagtccggtggtgacagcgtagtgggagaggagaggcatagcggggatgctccttgtcgggttactgttgcgggttgatgttgaggtcggtgacgtgtgggtggtcttctgttcctgtgacgaggcagtggacggtgactgggagtttggatgcgccgggctgtttcgcggttgcgccgtagacgatggagaaggtgtctttaccaataattttgtggagttggaggtcgatgtcggggttgccgttccagttgacaccgtgtgcggcggcctgttgttcggctttgcggttgcaggtgtgtgctgccgtgatcatggtgagaccttgtgaggtttcttcaccccttgcttgggcttgcttgtgggttttggcttgttcggcttgtagggagcgggtggcggctgcctgccgtgccgctttctcggctttgcgctgttggacggttttgggggtccattgggtgttggctgtggtggcttgtggtgttggctgtgaggctagtggcggattgtcgtcgggtgctggcaggaaggatgctgcggcgatgatggcggctgtgattccggcgatggtgtagcctgttttcttgttcatggctgttgtcccctttccggggtgttgttcgttgctgacatgatcaatactttcagcggctgggcccactgtcaaggttgcgctcaacgattgtgagcgtttggtgtgtggctaggggttttatcggctgtacagggtgaggaggtggccaacgttgatgcgggtcacgttccagtagagttgtgtggcttctccgccggtgagtggtctccactcgttgtggctgaacacggtgccgtcggtggcgatgaatgtgttggggcgtagcttgtggagttcggcttccacgctttgccggtaggcttcggcgaggccctcgaaatccatgtggtcgcaggagaggttttcgaggcgtgtcaggtcgaagggtgtggggcagtcgtagctggcgggggtgtagagctgggtgaagtggtcggcgatcttctgcatgattctttccttttcttgtgtggtgggttgatggtttttatcgtgtggcttcggcgatgatggcgtccacgtctatcgtgtcgatgatgtcgtggagttcctcagcctcgccataggtgagtggctgccagtcctggggtccgtatatggcaccgtcgagggtgacagtccacaggggtcggatgagtcgtacggcttcttcgactttagcgtggtacatgcggcgcaccatatccagatcgatgtcgtctgaatggtctccggtgaggcagtggagtctgagtgggttgatttctgtctgcccgtagaggctggtgaatgatggtgtgatgagtgtgccatccatgagggtgtgctcctttctggattgtttgggttggttgttgtggtttctagagtgtgtaggttgcgaccccatagtcaaggctgcgctcaaacccagtgagcgtttcatgctggagtgtcgggtgtgacagatgtcactcaagcatttactgcctctctcagcgtctcaaatcttctaggggtaggattatgcagggttaaccctgctgatcgattctagggcccttctagggtgtctcaggggtatgtctgggtgatagcgggtgtggcagatgatctagcgagtcaaggtgccgagctgagacataagatctatcatctaggtgtgtgaaatgtatcacactcgcctagtatggtgtgcactctcgaggtcgctctgtcgatctggcgtagagggtgtagcccagaaataccgtttaaagccttcacacggcgcctaggagcgccttgcagggtgggggctaggtatttatacccccaagcaattctgatcgattctagacgcctccaggagactgatacgcgatcaaccatctcggcatagatcatcaacccctatcctggttagctaagcctcaactatgtggacagtgtgggatactaagggggaagaaggacacggtaaaagaaagagaggggagcatcagccttcaagccttaaggtcttagcgcttagcaccgatggtcttagcagttagcaccgagccccctcaagggctcggcatcagccctaacaggcacagctcatcaggcacagccctgaaaagggtacacgccatcagggaaggcttgagagtacgaggagccctagcgacgagtactcgaaagcctgagggaacacccatcagcgctgatgggcctagcgtattcggaaaggacacaagggtacagtgtgagagctgttcgggagtgaaacctgttctgactaggggtttcaaccttaaccaccctcgaaggttacaagactctaagaaaatttaaggaaaagtttaggtttaatttttggacctttactaccaaaaacacccgtttacacccctcaaacccgcctatagagccaaatccaccagtttgactcatcccaggtgtggtatgataggctggacaggtagccagctggacgcaaggccgaaatccgctgacgcggctttcacccttacatccatcagtctaccaaagactttaaagcttcaaggctaagcgctaagcccttaagaccttaacacttaaggttataaataaacattaaagctttaaagtcttaaagtaactataaaaccttaacagttaaacacttaaagctttaaaccttaacacctaagttaagtataaaaccttaaaggcttagcacttaaggatataaacttaacatcagtgtttaagacttaaaggcttataaactttaatactttaagtaactataagactttaaagaccttaagtacttaaagttaaccatcagtcttaaactttaatattataacctataagtcttaaagcttataggtataataatataatataagttataaaagttttagaagagctaaggggttaacttctttacttctcttctctctttggttctttctctcttctcttcttttcttcatcaggggagaagagaaaccttttgccgtcaacgctgaagggctttcaccgtgtgactcgtgtgcttctggtcgcaagctcccatcgcccactccccacactctgacacctgtgtccctttcaggcttagcgagttcggctgaaggcgtacggcgtgtcacgctaacacccttaacactaggtaagacttaaagtgtatattatatgtagaagactttaaaacctataaggtgtttctgcttggcctgtgtcctacaccgctaggcgccaagcgctaagccttgaaacgcgaacacacacccacccccctttttcttccgtgtccttctctttttgacacggctggggggcgatgtgatctttctcacacccatgggggtagtggggaaaacaaacaccccctcaaacaaacaaaacagcccccagaatcgactagcagggcaagggcagagtattcatacccccaacggttcccaagcccttagagaggcaatgagaggcttacaggggccataggtgatcgggggaagtgatggcacacaccaaccgcaccgcatcgtcagcccaccgacgctggcggcaacgactcatcacccaagcccgacagcaaggccaaaccgaatgcccactctgcggagcaaccatcacctgggacacccatgacctgccaacaagccccgaagccgaccacatcacacccgtcagcaggggaggactcaacaccctcaacaacgggcaaatcatctgcagaacatgcaacagaagcaaaggcaatcgcagcgaaccaaacatcaagttccaacaacaaaccacaaaaacattgattccatggtgaaaaacccgccaacccccgccggggacaccccctgcacacccgtgcaagacctcgtacggcttagtgaaatacctctcttttgtggttttgtctgtttgtcgactttttgtgttggtggtgggtgttgtgcagcctgagcttcctgatagtcgtgattggtgtggggagacgcgtcgttggtggcgtgtgtggggtgaggatagccgcgcatcgtacgtgtctgatgaggagtggctgtttcttatggatgctgcggtgattcatgattgtgtgtggcgtgagggtcgcgcggatttggtggcttcgcttcgtgctcatgtgaaggcttttatgggtatgttggatcggtattcggttgatgtggcgtctggtggccgtggtgggggttctgcggtggcgatgattgaccggtataggaagcgtaggggggcctgattaggtgtctggtgttgtgggttctcaggttcctcgtcatcgtgtggctgcggcgtatcaggtgactgccggcaatgatgctggtgctcttggggctgcgtatgggttgacgcctgatccgtggcagcagcaggtgttggatgattggctggctgtcggtggtaatggcaggcttgcttctggtgtgtgtggggtgtttgtgcctcgacagaatggcaagaatgctattttggagattgtggagttgtttaaggcgactattcagggtcgccgtattttgcatacggctcacgagttggagtcggctcgtaaggcgtttatgcggttgaggtcgttttttgagaatgagcggcagtttcctgacttgtatcgtatggtgaagtcgattcgggcgacgaatggtcaggaggctattgtgttgcatcatccggattgtgccacgtttgagcgtaagtgtggttgtccgggttggggttcggttgagtttgtggcccgttcgaggggttctgctcgcggttttacggttgatgatttggtgtgtgatgaggctcaggagttgtcggatgagcagttggaggcgttgcttcctacggtgtctgcggctccttcgggtgatccgcagcagattttccttggcacgccgccggggcctttggcggacggtagcgtggtgttgcgtttgcgtggtcaggctttgtcgggtggtaaaaggtttgcgtggacggagttttcgattcctgacgagtctgatccggatgatgtgtcacgccagtggcggaagttggctggggagacgaatccggcgttggggcggcgtctgaatttcgggacggtgagcgatgagcatgagtcgatgtctgctgccgggtttgctcgggagcggcttggctggtgggatcgtggccagtctgctacgtctgtgattcctgcggataagtgggctcagtctgcggtggatgaggcgagtctggttggcgggaaagtgtttggtgtctcgttttctcgttctggggatcgtgtcgcgttggcgggtgccggtcgaactgatgctggggttcatgttgaggttattgatgggctgtcgggaacgattgttgatggtgtgggccggttggctgactggttggcggttcgttggggtgatactgaccggatcatggttgccgggtctggtgcggtgttgttgcagaaggcgttgacggatcgtggtgttccgggccgtggcgtggtggttgccgatactggggtgtatgtggaggcttgtcaagccttcctggagggtgtcaggtctgggaatgtttctcaccctagggctgattcaaggcgtgacatgttggatattgctgtgaggtcggctgtgcagaagaagaagggttctgcgtggggttggggttcctcgtttaaggatggttctgaggttcctttggaggctgtgtcgttggcgtttttgggggctaagcgtgttcgtcgtggccgtcgggagcgtagtggtaggaagcgggtgtctgtggtatgaactcggatgagttggccctgattgagggcatgtttgatcgtattcagaggttgtcttcgtggcattgtcgcattgagggctactatgagggttctgcccgggtgcgtgatttgggggtggctattccgccggagttgcagcgggtgcagacggtggtgtcgtggcctgggattgcggtggatgctttggaggagcgtctggattggcttggctggactaatggtgacggctacggtctggatggtgtgtatgctgcgaatcggcttgctacggcgtcgtgtgatgtgcatttggatgcgctgatttttggtttgtcgtttgtggctgttatcccccaagatgatgggtcggtgttggttcgtccacagtcaccgaagaattgcacgggccggttttctgccgatgggtctcgtttggatgctggtcttgtggtgcagcagacgtgtgatcctgaggttgttgaggcggagttgttgctgcctgatgtgattgttcaggtggagcggcgggggagccgtgagtgggttgagacgggccgtatcgtgaatagtcttggtgcggttccgttggtgcctgttgtgaatcgtcgccgtacctcgcgtattgatgggcgttcggagattacgaggtctattagggcttacacggatgaggctgtgcgcacactgttgggccagtctgtgaatcgtgatttttatgcgtatcctcagcgttgggtgacgggtgtttcggctgacgagttttcgcagcctggctgggtgttgtctatggcttctgtgtgggctgtggataaggatgatgatggggacactccgaatgtggggtcgtttccggttaattctcctactccgtattcggatcagatgcgcttattggctcagttgactgcgggtgaggctgctgttccggagcgctatttcgggttcattacgtctaatccgccttcgggtgaggctttggctgctgaggagtcgcggcttgtgaagcgggctgagcggcgtcagacgtcgtttggtcagggctggctgtcggttggtttcctggctgccagggcgcttgattcgagtgttgatgaggccgcgtttttcggtgatgtgggtttgcgttggcgtgatgcttcaaccccgactcgggctgctacggcggatgctgtgacgaagcgtgtgggtgccggtattcttccggcggattctcggacggtgttggagatgttgggtttggatgatgtgcaggttgaggctgtgatgcgtcatcgtgccgagtcttcggatccgttggctgcgctggctggggctatatcgcggcagacgaacgaggtttgataggtgatggcttcgggtgttgcgtcgcggatggctgctgccgggtatcagcgtgaggcgattcgttttgccgggaagtatgcgggctattatgccgagttgggtcgtttgtggcattccgggaagatgacagatgcgcagtatgtgcgtttgtgtgtggagttggagcgtgccggccatgacggttcagcagctatggcgggcaagtttgtgtccgattttcggaagcttaacggtgtcgctcctggtttgatcgtgtatgacgagtttgatgctgccgccgcgttggctaggtcgttttcgactatgaagatgatgaatagtgacccggatagagcgaatgatactattgatgcgatggctgcgggtgttaatcgggctgtcatgaatgctggccgtgacacggttgagtggtctgctggtgcgcagggccggtcgtggcgcagggtgactgatggtgatccgtgggctttttgtgccatgttggctacgaggtcggattatacgactcaggaaagggcactcactaccggtcatactcggcgtcataggcgtggtggtaagcgtccgtttggttcgaagtatcatgatcattgcggctgtacggtggttgaggttgttgggccttgggaaccgaatagggctgatgccgagtatcagaggacgtatgagaaggcccgtgagtgggttgatgatcatgggttgcagcagtcgcctggcaatattttgaaggctatgcgtactgttggcgacatgagatgatggtttccggttgtgtgccgccggttatcggtgcacagggttgtctcccgcacgggggtcaacaatgttgtgttgttttccgcaaggagtgttaggttaggctatggccgatcaaaacgttgaagaacagaatgttgacaatgatgctgttgagcccggaaagggtggagacattgttgatgttgtgaaggatgggcaggctgccggcgatgatcatgccggtgatgtttccgtgaaggaggagtcttcttctggcacggattggaaggctgaggctcgtaagtgggagtctcgtgctaaaagtaattttgctgagttagagaagcttcgcgcctcggatggtgatgcggggtctgtgattgatgatcttcgccgcaagaatgaggaactcgagggtcgtgttaacgagtttgttcttgagggtgtgaagcgtgatgtggctgccgagtgtggcctgtcgggtgatgcggtcgctttcttgcacggtggcgatcgtgaagcgctggtggagtctgctaaggctttgaagggtttgatcgaccatagtagtggtggcgcgggtgtgcgccgtcttgcggggagtgcccccgttgatgatgttaaacgacatgagggtgtcgcgtttgtggatgctcttgtcaataattctaggagatgatttgtgatggctgacgattttctttctgcagggaagcttgagcttcctggttctatgattggtgcggttcgtgaccgtgctatcgattctggtgttttggcgaagctttcgccggagcagccaactatttttggccctgttaagggtgccgtgtttagtggtgttcctcgcgctaagattgttggtgagggcgaggttaagccttccgcttcggttgatgtttcggcgtttactgcgcagcctatcaaggttgtgactcagcagcgcgtgagcgacgagtttatgtgggctgatgctgattaccgtctgggtgtgcttcaggatctgatttctccggctcttggcgcttcgattggtcgcgccgtggatctgattgctttccatggtgttgatccggctacgggtaagcctgctgctgctgtcaaggtgtcgcttgataagacgacgaagacggttgatgccacggattctgctacgaccgatcttgttaaggctgtcggcctgattgcgggggctggtttgcaggttcctaacggtgttgctttggatccggcgttctcgtttgctctgtctactgaggtgtatccgaaggggtctccgcttgccggccagcctatgtatcctgccgccgggtttgccggtttggataattggcgtggcttgaatgttggtgcttcttcgactgtttctggcgccccggagatgtcgcctgcctctggtgttaaggctattgttggtgatttctcgcgtgttcattggggtttccagcgtaacttcccgatcgaactgatcgagtatggtgacccggatcagactgggcgtgacctgaagggccataatgaggttatggttcgtgccgaggctgtcctgtatgtggctatcgagtcgcttgactcgtttgctattgtgaaggagaaggctgccccgaagcctaatcctccggctggtaactgatctatttgttgcgataatgttcatgctgtgtgcagggggtggtgttgatgggtatcattttgaagcctgaggatattgagcctttcgccgatattcctagagagaagcttgaggcgatgatcgctgatgtggaggctgtggctgtcagtgtcgccccctgtatcgctaaaccggatttcaaatatagggatgccgctaaggctattctgcgtagggctttgctgcgctggaatgataccggggtttcggggcaggtgcagtatgagtctgcgggtccttttgcccagactacacggtctaatacgcccacgaatttgttgtggccttccgagattgccgcgctgaagaagctgtgtgagggtgatggtggggctggtaaagcgttcactatcacacccactattaatggtcgatatgcacattctgaggtgtgttccactgtgtggggtggcggctgttcgtgcggatctgatattaacggctacgctggccctttgtgggagatatgatatgaccagttttccttacggtgaaacggttgtgatgcttcaaccgactgttcgtgtcgatgatcttggcgacaaggtggaagactggtctaagcctgtcgagactgtgtaccataacgtggccatctatgcttccgtttcgcaggaggatgaggccgcaggccgtgactctgattatgagcattggtcgatgcttttcaagtcccctgttgtgggtgccggttatcgttgccggtggcgtatccggggtgttgtgtgggaggctgacgggcctcctatcgtgtggcatcaccccatgtccggttgggatgctggtacgcagatcaatgtgaagcgtaagaagggctgatgggttgtggtccaggatgtgaatgtgaagctgaatttgcctggtattcgtgaggtgttgaagtcttctggggtgcagggcatgttggctgagcgtggcgaaagggtgaggcgtgcggcttcggcgaatgtgggcggtaatgctttcgatagggcccagtatcgtgccggtttgtcgtcggaggtgcaggttcaccgtgtggaggctgtcgcccgtattggcaccacctataagggtgggaagcgtattgaggcgaagcatggcacgctggcgaggtcgattggggcggcgtcgtgatcgtctacgatgaccctaggaagtgggctaaacgtgtgctcaaggatgatggctggctgtccgatataccgtgtactgggacggtgcctgaccggtttgagggtgaccttatttggttggctcttgatggtggcccgcagttgcatgttcgtgagcgtgtttttttgcgggtgaatgtgttttctgatatgcctgatcgggctatgagcctgtcgaggcgtgttgaggctgtgctggctgatggtgtggatggtgacccggtggtgttttgtcggcgttcttctggccctgattttgtggttgatggtg

SEQ ID NO: 55 - DNA, 16971 bp, Pahexavirus sp.
  source 1..16971: mol_type = genomic DNA
atctgatgccgggtgatttgatatatgtggatgtgggctcggggcctattgcggagattgttcggcagattgatgtggagtgtgattcgcctggtgatggctggacgaaggtgactcctgttgcgggggattatgaggataatccgtcggcgttgctagcacggcgtgtggctggtttggctgcgggtgtgcgggatttgcaaaaattttagaaaagaattgggggtttgttatgggtattgtgtgcaagggctttgatggtgtgttgaccgagtatgattgggctcaaatgtctggtctgatgggtaacatgccttcggtgaaagggccggacgattttcgcgtcggcactactgttcagggtgccacagtgttgtgtgaggttttgccggggcaggcttgggctcacggggtgatgtgcacgtcgaatagtgttgagacggtgacggggcagcttccgggccctggtgagacccgctacgactatgtggtgttgtctcgggattgggagcagaacacggccaagttggagattgttcccggggggcgtgcggagcgtgcccgtgacgtgttgcgtgcggagcctggcgtgttccatcagcagctactggctactttggtagtgtcgtctaacgggttgcagcagcagctggatcggcgtgctgtagcggccagggtggcgtttggggagtctgctgcgtgtgatcctacccctgtggagggtgatcgtgtgatggttccttctggggctgtgtgggctaaccatgtcaatgagtggatgttgttgtctccgcggatcgagacgggttcgaagcagatccagtttggcgggtctgctgtgtatgcttacacgatcccgtttgcccgcccgtttggtagtgcgcctgttgtggtggcgtctatggcgacggcggctgggggcacgcagcagattgatgtgaaagcctacaatattactagcaaggattttcagttggcgtttattacgaatgatgggtctaagccgaatggcgtgcctgcggttgctaactggattgctgtcggcgtgtaatgtacggcttgcgggtatgtgacgtgttgtggttgttgtagtggtagggggctgtagtgtcatggcttacacccacactcgtagcctctctttgtaccgctatcgctactgttcttggttcgattcaggcggctacgtacaggtcgaagaagaggcttaggcagttgtctgcgcaggttgatgcgatggaagagtacacgtggaatattcgccatattgttcaccgctataacgcgaatctgccggagaatgttgagccggtgaagatgcctgatttgcccgagtttttgaaggatactgttgatggtggtggggggtgaattgtgagggagttggaggaggagaagcggcagcgccgctcgtttgagaaggcttccctgatactgttgttcttgtcgcttgtactgttggcggtggttgccgggggtgctttacggtacgggtctgtggcttcccaaagggattcggagcaggctaaagcccagtctaatggtacggctgccaagggtttggctgcccgtgtgtggcaggtgtgtgcttctggcgggcaggagtctgtgcggcttcaccagtctggtttgtgtgtggatgctcagcgtgttgagcggagtgtgcagggtaggtcgtggcgtcgggtgactgacggggatccgtgtgctttttgtgccatgttggctacgaggtcggattatacgactaaggaaagggctcttactactggtcatactcggcgtcataagcgtggtggtaagcgtccgtttggttcgaagtatcatgatcattgtggttgtacggtggttgaggttgttggcccttgggaaccaaatagggctgatgccgagtatcagaggacgtatgagaaggcccgtgagtgggttgatgatcacgggttgcagcagtcgcctggcaatattttgaaggctatgcgtactgttggcggcatgagataatttgatgtggtttccggttgtgtgccgccggttattggtgcacagggttgtctcccgcacgggggtcaacaatgttgtgttgttttccgcaaggagtgtagggttaggctatggccgatcaaaacagtgaaaaagaaaacatcaacaatgaagagaatgttgaatccggaaagggtaatggcattgttgatacagtaaaagacgatggcgggcaggaggtagccgacaatcagttgaagaatgaaggcgagggtaaatcgtctgggactgattggaaggctgaggcccgtaagtgggagtctcgtgctaaaagtaattttgccgagttggagaagcttcgtacatcgagtgacgattctggatctactattgatgagcttcgccgcaagaatgaggaactcgaagacaggatcaacgggtttgttcttgagggtgtgaagcgcgaggtggcttcagagtatggtttgtccagtgatgcgatcgctttcttgtcgggtggcgataaagagtcgcttgccgagtctgcgaaagctttgaagggtttgatcgaccatagtagtggtggcgcgggtgtgcgccgtcttgcggggagtgcccccgatgatgatgttaaacgacgtgagggtgtcgcgtttgtggatgctcttgtcaaaaattctaggagatgatttgtgatggctgacgattttctttctgcagggaagcttgagcttcctggttctatgattggtgcggttcgtgaccgtgctatcgattctggtgttttggcgaagctttcgccggagcagccgactatttttggccctgttaagggtgccgtgtttagtggtgttcctcgcgctaagattgttggtgagggcgaggttaagccttccgcgtctgttgatgtttcggcgtttactgcgcagcctatcaaggttgtgactcagcagcgcgtctcggacgagtttatgtgggctgacgcggattaccgtctgggtgttttgcaggatctgatttcccctgctcttggtgcttcgattggtcgcgccgtggatctgattgctttccatggtattgatcctgctactgggacgcctgctgcggctgtcaaggtgtcgctggataagacttcgaagacggttgatgcaaccgattccgctacggctgatcttgttaaggctgtcggcctggttgctggggctggtttgcaggttcctaatggtgttgctttggatccggcgttctcgtttgctctgtctactgaggtgtatccgaaggggtctccgcttgccggtcagcctatgtatcctgccgccgggtttgccggtttggataattggcgcggcctgaatgttggtgcttcttcgactgtttcgggtgccccggagatgtcgcctgcctctggtgttaaagctattgttggtgatttctcgcgtgttcattggggtttccagcgtaacttcccgatcgaactgatcgagtatggcgacccggatcagactggccgcgatttgaagggccataacgaggttatggttcgtgccgaggctgtgctgtatgtggctatcgagtcgcttgcctcgtttgctgttgtgaaggagaaggctgccccgaagcctaatcctccggccgagaactgattcatttgttgcggtgatgtgtcaatgtgcagggggtggtgttgatgggtatcattttgaagcctgaggatattgagcctttcgccgatattcctagagagaagcttgaggcgatgattgccgatgtggaggctgtggctatcagtgtcgccccctgtatcgctaaaccggatttcaaatacaaggatgccgctaaggctatcctacgtagggctttgctgcgctggaatgataccggcgtgtcgggtcaggtgcagtatgagtcggcgggtcctttcgctcagactacacggtccaatactcctacgaatttgttgtggccttctgagattgctgcgttgaagaagttgtgtgagggtgatggtggggctggtaaagcgttcactattacaccgaccatgaggagtagtgtgaatcattctgaggtgtgttccacggtgtggggtggcggctgttcgtgcgggtcgaatattaacggctacgctggccctttgtgggaggtatgatatgaccagttttccttacggtgaaacggttgtgatgcttcagccgactgttcgtgtcgatgatcttggtgacaaggtggaagactggtctaagcctgtcgaaaccgtgttccataatgtggccatctatgcttccgtttcgcaggaggatgaggctgcggggcgtgactcggattatgagcattggtcgatgcttttcaagtcccctgttgtgggcgctgattatcgttgccggtggcgtattcggggtgttgtgtgggaggctgacgggtctcctatggtgtggcatcatccgatgtctggctgggatgctggtacgcaggttaatgtgaagcgtaagaagggctgatagattgtggctcaggatgtgaatgtgaagctgaacttgccgggtattcgtgaggtgttgaagtcttctggggtgcaggctatgttggctgagcgtggcgagcgtggcaagcgtgcggcctcggcgaatgtgggcggtaacgcttttgataaggcccagtatcgtaatggcttgtcgtcggaggtacaggttcaccgtgttgaggctgtggcgaggattggcaccacatataagggtgggaagcgtattgaggcgaagcatggcacgctggctcgttcgattggggctgcgtcgtgatcgtctacgatgaccccaggaagtgggctaaacgcgtgcttaaggatgatggctggctgtcggtagcaatggcaggcttgcttcgggtgtgtgtggggtgtttgtgcctcgccagaatggcaagaatgctattttggagattgtggagttgtttaaggctactattcagggtcgtcgtattttgcatacggctcatgagttgaagtcggctcgtaaggcgtttatgcggttgaggtcgttttttgagaatgagcggcagtttcctgacttgtatcgtatggtgaagtcgattcgggcgacgaatggtcaggaggctattgtgttgcatcatccggattgtccgacttttgagaagaagtgtggctgcagcggttggggttcggttgagtttgtggcccgtagccgtggttctgctcgcgggtttacggttgatgatttggtgtgtgatgaggctcaggagttgtcggatgatcagttggaggctttgcttcctaccgtgagcgctgccccgtctggtgatccgcttcattttttccttggtacgccgcctgggccgttggctgacggtagcgtggtgttgcgtcttcgagggcaggctttttagggtggtaaacggtttgcgtggacggagatttcgattcctgacgagtcggatctggatgatgtgtcgcggcagtggcggaagttggcgggggagacgaatcctgcattgggtcgtcgtctgaattttgggacagtttcggatgagcatgagtcgatgtctgctgccgggtttgctcgggagcggtttggctggtgggatcgtggccagtctgctgcgtctgtgattccggcggataagtggtcccagtctgcggtggatgaggctagtttggttggcggcaaggtgtttggtgtctcgttttctcgttctggggatcgggttgctttggctggtgccggccggactgatgctggtgttcatgttgaggttattgatgggctgtcgggaacgattgttgatggtgtgggccggttggctgattggctggcgttgcgttggggtgacacggaaaagattatggttgccgggtctggtgcggtgttgttgcagaaggcgttgacggatcgaggtgttccgggccgtggcgtggtggtggctgatactggcacctatgtggaggcttgtcaagccttcctggagggtgtcaggtcgggtgtggtttctcatcctcgtgccgattcgaggcgtgagatgttggatattgctgtgaggtcggcggttcagaaaaagaaaggctctgcgtggggttggggttcctcgtttaaggatggttctgaggttcctttggaggctgtgtcgttggcgtttttgggggctaaacgtgttcgtcgtggccgtcgggagcgtagtggtaggaagcgggtgtctgtggtatgaactcggatgagttggctctgattgagggcatgtacgatcgtatccaaaggttgtcttcgtggcattgccgtattgagggctactatgagggctcaagccgggtgcgtgatttgggggtggctattcctccggagttgcagcgtgtgcagacggtggtgtcgtggcctgttatagctgtggatgctttggaggagcgtctggattggcttggctggacgaatggtgacggctacggcctggatggtgtgtatgctgcgaatcggcttgctacggcgtcgtgtgatgtgcatttggatgcgctgatttttggtttgtcgtttgtggctgttattccccaggatgatgggttggtgttggttcgtccgcagtcaccaaagaattgtactggccggttttcggctgacgggtctcgtttggatgctggccttgtggttcagcagacgtgtgatcctgaggtggttgaggcggagttgttgttgcctgatgggattgttcaggtggagcggcggggttcgcgtgagtgggttgagacgggccgtataccgaatgtgttgggtgcggttcctttggtgcctgttgtgaatcgtcgtcgtacttctaggatggatgggcgttcggagattacgaggtctattagggcttactcggatgagggtgtgcgcacactgttggggcagtctgtgaatcgtgatttttatgcgtatcctcagcgttgggtgactggcgtgagcgcggatgagttttcgcaaccgggttgggtcctgtcgatggcttctgtgtgggctgtggataaggatgatgatggtgacactccgaatgtggggtcgtttcctgtgaattctcctacaccgtattcggatcagatgcggctgttggcgcagttgactgcgggtgaggcggctgttccggaacgctatttcgggcttattacgtctaacccgccttcgggtgaggcgcttgcggcggaggagtcgaggcttgtgaagcgtgctgagcggcgtcaaacgtcgtttggtcagggctggctgtcggttggtttcctggctgccaaggcgcttgattcttctgtgaacgaggccgatttttttggtgatgtgggtttgcgttggcgtgatgcttcgacgccgactcgggctgctacggctgatgctgtgacgaagcttgtgggtgccggtattttgccggcggattctcggacggtgttggagatgttggggcttgatgatgtgcaggttgaggctgtgatgcgtcatcgtgctgagtcgtctgacccgttggcggcactggctggggctatatcgcgtcaaactaacgaggtatgataggcgatggcttcgggggtggaggcgaggcttgctgcgactgagtatcagcgtgaggcggtcaggtttgctgggaagtatgcgggctattatgccgagcttggtcgtttgtggcattccgggaagatgacagatgcgcagtatgtgcgtttgtgtgtggagttggagcgtgccggccatgatggttcggcatcgttggctgccaggtttgtgtcggattttcgccggttgaatggtgtggatccgggtttgatcgtgtatgacgagtttgatgctgccgccgcgttggctaggtcgttttcgactatgaagattcttgagagtgacccggatagggcgaatgactcgattggttcgatggctgcgggtgttaatcgggctgtcatgaatgccggtcgtgacacggttgagtggtctgcgggtgcgcggggtaggtcgtggcgcagggtgactgatggtgatccgtgcgcgttttgtgccatgttggctacgaggtcggattatacgaccaaagagcgggcgcttactactggtcatacgcggcgtcataagcgtggtggtaagcgtccgtttggttcgaagtatcatgatcattgtggttgtacggtggttgaggttgttggcccttgggagccaaatagggctgatgctgagtatcagaggacgtatgagaaggcccgtgagtgggttgatgatcacgggttgcagcagtcgcctggcaatattttgaaggctatgcgtactgttggcgacatgagatgatggtttccggttgtgtgccgccggttatcggtgcacagggttgtctcccgcacgggggtcaacaatgttgtgttgttttccgcaaggagtgtaggttaggctatggccgatcagagtgttgaggaacagaatgttgacaatgatgctgtggagcccggaaagggtgacggcattgttgacacggtgaagggcgatcaaggcaaacaggttgaagatcagtcgaagagtgaaggcgagggtaaatcgtctgggactgattggaaggcggaggctcgtaagtgggagtctcgtgctaaaagtaattttgccgagttggagaagcttcgtacctcgagtggcgattctggatctactattgatgagcttcgccgcaagaatgaggaactcgaagacaggatcaacgggtttgttcttgagggcgtgaagcgcgaggtggcttcagagtatggtttgtccagtgatgcgatcgctttcttgtcgggtggcgataaggagtcgcttgccgagtctgcgaaagctttgaagggtttgatcgaccatagtagtggtggcgcgggtgtgcgccgtcttgcggggagtgcccccgttgatgatgttaaacgacgtgagggtgtcgcgtttgtggatgctcttgtcaataatcctaggagatgatttctgatggctgacgattttctttctgcagggaagcttgagcttcctggttctatgattggtgcggttcgtgaccgtgctatcgattctggtgttttggcgaagctgtcgccggagcagccgactattttcgggcctgtgaagggtgccgtgtttagtggtgttcctcgcgccaagattgttggcgagggcgagattaagccttccgcatcggtggatgtttcggcgtttactgcgcagccgatcaaggttgtgactcagcagcgcgtaagcgacgagtttatgtgggctgacgctgattaccgtctgggtgttttgcaggatctgatttcgcctgctcttggtgcttctattggtcgcgccgtggatctgattgctttccatggtgttgatccggctacgggtaagcctgctgcggctgtcaaggtgtcgctggataagacgaagaatgttgttgatgccacggattctgccacgaccgatcttgttaaggctgtcggtcttatcgctggagccggtttgcaggttcctaacggtgttgctttggatccggcgttctcgtttgctctgtcgactgaggtgtatctgaaggggtctccgcttgccggtcagcctatgtatcctgccgccgggtttgccggcctggataattggcgtgggctgaatgttggtgcttcttcgactgtttcgggtgccccggagatgtcgcctgcttctggtgttaaggctattgttggtgatttctctcgtgttcattgggggttccagcgtaacttcccgattgagctgatcgagtatggtgacccggatcagacggggcgtgatttgaagggccataatgaggttatggttcgttccgaggctgtgctgtatgttgcgattgagtcgcttgattcgtttgctgttgtgaaggagaaggctgccccgaagcctaatccgccggccggtaagtgatttattgttgcggtgatgtgtcaatgtgcagggggtggtgttgatgggtaccattttgaagcctgaggatattgagcctttcgccgatattcctagagagaagcttgaggcgatgatcgctgatgtggaggctgtggctgtcagtgtcgccccctgtatcgctaaaccggatttcaaatacaaggatgcggctaaggcgatactgcgcagggctttattgcgctggaatgatactggtgtttctggttaggtgcagtatgagtctgcgggtcctttcgcccagactacacggtctaatacgcccacgaacttgttgtggccttccgagattgccgcgttgaagaagctgtgtgagggtgatggtggggctggtaaagcgttcactatcacccccactattaatagtagatatgcacattctgaggtgtgttccacagtgcggggtggcggctgttcgtgcggttctgatattaacggctgcgatggtcctttgtgggagatatgatatgactggttttccttatggtgaaacggttgtgatgcttcagccggctgttcgtgtcgatgatcttggcgacagggttgaggattgggggcatcctgtagaaaccgtgtaccataatgtggccatctattcttcgttgtcgcaggaggatgaggcggcaggccgtgactcggattatgagcattggtcgatgctgttcaagcagcctgttgggggtgctgattatcgttgccgatggcgtattcggggtgttgtgtgggaggctgacgggtctcctgtggtgtggcatcatccgatgtctggctgggatgctggtacgcagattcatgtgaagcgtaagaagggctgatagattgtggtccaggatgtggatgtgaagcagaacttgccgggtattcgtgaggtgttgaagtcttctggggtgcaggctatgttggctgagcgtggcgagcgtgtcaagcgtgcggcctcggcgaatgtgggcggtaacgctttcgataaggcccaataccgtaatggtttgtcgtcggaggtgcaggttcaccgtgttgaggctgtggcccgtattggcaccacatataagggtgggaagcgtattgaggcgaagcatggcacgctggctcgttcgattggggctgcgtcgtggtcgtctacgatgaccccaggaagtgggctaaacgcgtgcttaaggatgatggctggctgtctgggataccgtgtactgggacggtgcctgaccggtttgagggtgaccttatttggttggctcttgatggtggcccgcagttgcatgtgcgtgagcgtgtttttttgcgcgtgaacgtgttttctgatacgcctgatagggctatgtctttggcgcgtcgtgttgaggctgttctggctgacggggtggacggtgaccctgtggtgtactgtaaacggtctactggccctgatttgctggttgatggttcacgttttgatgtgtattcgctgttcgagctgatatgtaggcctgcggagtctgaataagcttattgtttttgttttaatgtaattgtttgatatttaatgggggttaagatggctgcaacacgtaaagcgtctaatgttcgctctgctgttacgggtgacgtctatattggtaaagctcatgccggtgacactattgatggtgtgaagacggttcctgacggtcttaccgctttagggtacctgtctgatgacgggtttaagattaagccggagcgtaaaacggatgatttgaaggcttggcagaatgcggatgttgttcgcactgtggctacggagtcgtctatcgagatttctttccagctgatcgagtctaagaaggaggttatcgaactgttttggcagtcgaaggttactgccggagccgattcgggttcgttcgatatttctcctggtgccaccactggcgtgcacgctctgttgatggatattattgatggcgatcaggttattcgctactatttccctgaggttgagcttgtcgatcgtgacgagattaagggcaagaatggcgaggtgtacgggtatggtgtgacgttgaaggcgtatcctgcccagattaataagaagggtgatgcggtgtctggtcgggggtggatgacggctttaaaagctgatactcccccgactcctcctccggccccgaagcctccgaagcctgagccggatcctaatccgccgtctaataactgatacacatagtttgagggattgttgatagatgagtgacacaggttacacgttaaagattggtgaccgtagctgggtgttggcggatgcggaggaaccagcgcaggctgttcctgcccgcgtttttcgccgtgccgccaggattgcccagtcgggtgagtctgcggatttcgcccaggttgaggtgatgttttctatgttggaggctgccgccccggctgacgcggtggaggctttggaggggcttcctatggttcgtgttgctgagattttccgtcagtggatggaatacaagcctgacggtaagggtgcctccctgggggaataatttcgctccacggcctgattgatgattatcgtggggccatcgaatatgattggaggacccggttcggttgctcggtttatgatgttggtggcccgcagatgtgttggggcgaggctgtccggctggctggcgtgttgtgtaccgatacgtctagccagttggcggcccaccttaatggttggcagcgcacgtttgagtggtctgagtgggctgtgctggacatgctggatcattacagatctgctaatagtgaggggcagccggagcctgtggcgaggcctacggatgagcgtagggcccggtttacgtctgggcaggtggacgatattttggcgcgtgttcgtgccggtggcggggtgtctcgcgagattaatattatggggtgaatagtgtatgtctggtgagattgcttccgcatatgtgtcgttgtatacgaagatgcctggtttgcaggcggatgttggtaaacagctttctggggttatgcctgctgagggtcagcgttcgggtagtctttttgctaagggcatgaagttggcgcttggtggtgccgcaatgatgggtgccatcaatgttgctaagaagggcctcaagtctatctatgatgtgactattggtggcggtattgctcgcgcgatggctattgatgaggctcaggctaagttgactggtttgggtcatacgtcgtctgatacgtcttcgattatgaattcggctattgaggctgtgactggcacgtcgtatgcgttgggtgatgcggcgtctacggctgccgcgttgtctgcttctggtgtcaagtctggcgggcagatgacggatgagttggagactgtcgcggatgtgtcttatatttctggcaagtcgtttcaggatacgggcgctatttttacgtcggttatggcccgcggtaagttgcagggcgatgacatgttgcagcttacgatggcgggtgttcctgtactgtctttgcttgccaggcagacgggtaaaacctcggctgaggtgtcgcagatggtgtcgaaggggcagattgattttgccacgtttgcggctgcgatgaagcttggtatgggtggtgctgctcaggcgtctggtaagacgtttgagggcgctatgaagaatgttaagggcgccctgggttatcttggtgctacggctatggcgccgtttcttaacggcctgcggcagatttttgttgcgttgaatccggttatcaaatctatcacggattctgtgaagccgatgtttgcgtcggttgatcagggtattcagcgggtgatgccgtctattttggcgtggattaaccgtatgccgggcatgattacgagaatgaatgcacagatgcgcgccaaggtggagcagttgaagggcatttttgcgagaatgcatttgcctgtccctaaagtgaatttggctgccatgtttgctggcggcaccgcagtgtttggtattgttgctgccggtgtggggaaacttgttgcagggtttgccccgttggcggttgcgttgaagaatctactgccgtcgtttggtgctttgaagggtgccgctggcgggcttggcggcgtgtttcgcgccctgggtggccctgtcgggattgtgatcggcttgtttgctgccatgtttgccactaacgcccagttccgtgccgcggtgatgcagcttgtggctgtggttggccaggcgttgggccagattatggccgctgtgcagccactgtttggtttggttgcggggattgtggcccagttggcgccagtgttcggccagattatcggtatggttgccgggctggctgcccaactggtgcctttgattagtatgcttgtcgcccggctagttcctgtgatcacgcagattattggtgcggtgacacaggttgctgcaatgttgttgcctgcgttgatgccggtgttgcaggcggatgttgctgtgatacggcaggttgttggcgtgatcatgcagttggtgcctgttttgatgcctgtgattcaacagattttgggtgctgtcatgtctgttctgccgcctatcatcggcctgatccggtcgctgataccagtcatcatgtcgattatgcttgtggtggtgcaggttgtttcggttgtgttgcaggtggtggcccacattattccggttgtgatgccgattgtaacagctgtgatcgggtttgttgcacgtattcttggcgctattgtgtctgctgcagcccgcattattggggctgtcacccgtgtcatctcatgggttgtgaatcatttagtgtctggcgtaaggtctatgggcacggccatcttgaatggctggaatcatattagagcgtttacgtcagcgtttattaacggtttcaagtcgatcatttctggcggcgtgaacgcggttgtcgggttttttgcccggcttggttcttcggttgccgcccatgtgaggtctggttttaacgcggctcgtggcgctgtttcttctgcgatgaatgctattcggagtgttgtgtcttcggtggcgtctgctgttggcgggtttttcgggtcgatggcttctagggttcgtggtgctgcctcatccgggtttaatggtgcccggagtgcggcctcgaatgctatgcatgctatgggctcggctgtgtctaacggtgtgcatggtgtgctgggttttttccggaatctgcccggtaatattcggcgtgcgcttggtaatatggggtccctgttggtgtctgctggccgtgatgtggtgtctggtttgggtaatggaatccggaatgctatgagtggcctgttggatacggtgcgtaatatgggttctcaggtggctaatgcggcgaaatcggtgttgggtattcattccccgtctagggtgtttcgtgaccaggttggccgtcaggttgttgccggtttggctgaggggatcaccggtaatgccggtttggcgttggatgcgatgtcgggtgtggctggtcggctgcctgatgcggtggatgcccggtttggtgtgcgatcgtctgtgggctcgtttaccccgtatggcaggtatcagcgtatgaatgataagagtgttgtggtgaatgtgaacggacccacgtatggggatccgaacgagtttgcgaagcggattgagcggcagcagcgtgacgctttgaatgcgttggcttacatgtgataggggggtgttgttcatgtttattcctgacccgtctgatcgttctggtttgactgttacctggtttatggatccgctgtacggtgaggagcgtgtgcttcatttgacggattatacgggtgcgtctccggtcatgttgttgaatgattcgttgcgcggtttgggtgttcctgaggttgagcatttttctcaaactcatgttggtgtgcacggctcggagtggcgcgggtttaatgtgaagcctcgcgaggtgacattaccggttttggtgtcgggtgttaacccggatcctgatggcgggtttcgtgacggttttttgaaagcctatgacgagttgtggtctgcttttcctcctggcggggagggggagttgtctgtgaagacgcctgccggccgtgagcgtgtgctaaaatgccggtttgattcggtggatgacacgtttacggtggatccggttaatcgtggctatgcgcgctatctgttgcatttgacagcttatgacccgttttggtatggggaggagcaaaagtttcgtttcagtaacgcgaagttgcaggattggctgggtggcggtcctgtcggcaaggatggcacggcgtttcctgtggtgttaacaccgggtgttggttcgggttgggataatttgtcgaataagggtgatgtgcctgcgtggcctgtgattcgtgttgagggcccgttggagtcgtggtctgtgcagattgatggtttgcgtgtgtcttctgattatcctgtcgaggagtatgattggatcactattgatacggatcctcgtaagcagtctgcattgttgaacgggtttgaggatgtgatggatcgtttgacggagtgggagtttgcgcctatcccgcctggcggttctaagagtgtgaatattgagatggttggtttgggtgccactgttgtgtcggtgcagtacaggtttttaagggcttggtgaatagttgatggctggtcttgttccgcatgtaacattgtttacaccggattatcgccgtgtggcgcttatcaatttttttgaatcattgaagttgtcgttgaagtggaatggtttgtccactttggagttggtggtgtcgggtgatcattcgaggcttgacgggttgactaggcctggggcgcggctggttgttgattatggtggtggccagattttttcggggcctgtgcgtaaggtgcacggggttgggccttggcagtcctcgaaggtgactgtgacgtgtgaggatgatatccgcctgttgtggcgtatgttgatgtggcctgtgaattatcgtcccggtttggtgggtatggagtggcgtgccgacagggattatgcccattattcgggtgcggctgagtcggtggctagcaggtgttgcgggata

SEQ ID NO: 56 - DNA, 12861 bp, Pahexavirus sp.
  source 1..12861: mol_type = genomic DNA
attcacaggccacaacagcatacgccacgacaggcgaatatcatccgcacacgtgatagtcacccgcgaagaccgccaaggaccaacaccatgaaccttgcgcacaggcccagaaaaaatccggccaccaccataatcaacaaccagccgtgcacccggcctagtcaacgcgtcaagcctggaatgatccccagacaccaccaactccagtgttgacaaaccattccacttcaacgacagtttcaacgactcaaaaaaattgataggcgccacacggcgataatccggcgtaaacaacgttacatgcggaacaagaccagccatcaaccattcaccaagccctcaaaaacctgtactgcaccgacacaacaatggcacccaaaccaaccatctcaatattcacactcttcgaaccgccaggcggaataggcgcaaactcccactctgtcaaacgatccatcacatcctcaaacccattcaacaacgcaggctgctggcgaggatccgtatcaatagtgatccaatcatactcctcgacaggataatccgaagacacacgcaaaccatcaatctgcacagaccacgactccaaaggaccctcaacacgaatcacaggccacgcaggaacatcacccttattagacaggttatcccagcccgaaccaacaccaggcgtcaacaccacaggaaacgccgtgccatccttgccgacagggccgccacccaaccaatcctgcaacttcgcgttactaaaacgaaacttctgctcatccccataccaaaacggatcataggctgtcaaatgcaacagatagcgggcatagcccctgttcaccggatcaaccgtaaacgtgtcatccaccgaatcaaaccggcattttagcacacgctcacgaccggcaggagtcttcaccgataactcccccacctcgccaggaggaaacgcagaccacaactcgtcatacgccttcaaaaaaccgtcacgaaacccgccaaccggatccgggtcaacacccgacaccagcacaggaagcgtcacctcgcgaggcttcacattaaacccgcgccactccgagccgtgcaccccaacatgagtttgagaaaaatgctccacctcaggaacacccaggccgcgcaacgaatcattcaacaacatgacaggagacgaccccgtataatccgtcaaatgaagcacacgctccggaccattaccaatcaacggcaacatagaccaggtaacagccaaaccagaacgatcagacgggtcaggaagaaacatgaacaacacccccaatcacacgtaagccaacgcgttcaaagcatcacgctgctgccgctcaatccgcttcgcaaactcgttaggatcaccatacgtaggtccattcacattcaccacaacactcttctcactcgcacgccgataccggtcgtacggggtaaacgagcccacagacgatcgcacaccaaaccgggcatccaccacatcaggcagccgaccagccacaccagacatcgcatccaacgccaaacccgcattaccagtaataccctcagccaaaccggcaacaacctgacggccaacctcgtcacgaaacaccctcgacggggaatgaatacccaacaccgacttcgcagcattagcaacctgggaacccatattacgcaccgtatccaacaggccgctcatagcattccggataccattacccaaaccagacaccacatcacggccagcagacaccaacaaggaccccatactacccaaggcgcccctaatattactgggaagattcctgaaaaaacctatcacactatgcacaccactagacacagccgagcccatagcgtgcatagcagaagaagccgcacccctcgccccgttaaacccgctagaggctgcaccacgaaccctagacgccatcgacccaaaaaacgagccaacagcagacgccaccgaagacaccacactacgaataccgttcatcgcagccgaaacagcgccacgagccgcgttaaaaccagacctcacatgggaggcaaccgaagaacccagccgggcaaaaaaccccacaaccgcggccacaccggcagaaatgatcgacttgaaaccgttaataaacgcagacgtaaacgccctaatatgattccagccagcctgaaccaccgaacccatacgcgccaaaccagacacaaaatgggcaacaacccgcgagatgacacgggcaacagcggcaatgacacgggccacagccgacacgacagcaccaacaatacgggcaacaaacccgaccacggccgccaccatcggagccacaacagcaagaatacgggccaccacctgtatcacaaccgcaacaacctgaaccaccacacgcataacagacatgatgactggtatcaacgaccggatcaggccaataataggtggcagcacagacatgacagtacccaaaatctgctgaatcaccggcatcaacaccggcaccaactgcatgaccacaccaacaacctgccgtatcacagcaacaacagcctgcaacaccggcataagcgcaggcaacaacatggcagcaacctgcgtcaccgcaccaataatctgcgtgatcacaggaaccagccggacaaccaacataccaatcacaggcaccagctgggcagccaaaccggcaaccataccgataatctggccgaacactggcgccaactgtgcaacaaccccggcaaccaaaccaaacagtggctgaatagcggccatgatctgccccaacgcttgaccgacaacccccacaagctgcataacagcggcacgaaactgggcgttagtggcaaacatggccgcaaacaagccgatcacaatcccgacagggccacccaaagcgcgaaacacgccgccaagccccccggcggcacccttcaaagcaccaaacgacggcagtagattcttcaacgacaccgccaacggggcaaaccccgctacaagcttccccacacccgcagcaacaataccgaacaccgctgtgccacccgcaaacatggcacccaaattcactttagggacaggcaaatgcaacctcgcaaaaatgcccttcaactgctcaaccttggcgcgcatctgtgcattcattctcgtaatcatgccaggcatacgattaatccacgccaaaatagacggcatcatacgctgaataccagcatcgacggcagcaaacatcggcttcacagactccgtgatagacttgataaccggattcaacgcaacaaaaatctgccgcaggccgttaagaaacggcgccatagccgtagcaccaagatagcccagggcgctcttaacattcttcatagcgccctcaaacgtcttaccagacgcctgcgcagcaccacccatgccaagcttcatcgcagctgcaaacgtgttaaaatcaatctgccccttcgacaccatctgcgacacctcagcagacgttttaccagtctgcctggcaagcaaaggcagcacaggagcacccgccatcgtaagctgcaacatgtcatcgccctgcaacttaccgcgagccatcacagacgtaaaatagcgcccgtatcctgaaacgacttacccgaaatataagacacatcggcgacagtcttcaacacatccgtcatctgcccgccagacttcacaccagaagcagacaacgccgccgcagtagaagccgcatcccccaacgcatacgacgtaccagtcacagcctcaatagccgaattcataatcgaagacgtgtcagaagacgtatgacccaaaccagtcagtttagcctgagcctcatcaatagccatcgcccgagcaataccgccaccaatagtcacatcatagatagacttcaaacccttcttggcaacattgatggcacccaccattgcggcgccaccaagcgccaacttcatgcccttagcaaacaagctacccgaacgctgaccctcagcaggcataaccccggaaagctgtttaccaacatccgccttcaaacccggcatcttcgtatacaacgacacatatgcggaagcaatctcaccagacatacactattcaccccataatattaatctcgcgagacaccccgccaccggcacgaacacgcgccaaaatatcgtccacctgcccagacgtaaaccgggccctacgctcatccgtcggcctcgccacaggctccggctgcccctcactattagcagacctgtaatgatccaacatgtccagcacagcccactcgcaccactcaaacgggcgctgccaaccattcaggtgggccgccaactagctagacgtatcggtacacaacacgccagccagccggacagcctcaccccaacacatctgcgggccaccaacactataaacagaaacaccaaacttggtgcggaaatcgtattcgatggccccacgataatcatcaatcaggccgtggagccaaactattcccccagtgaggcacccttaccgtcaggcttatattccatccactcacggaaaatctcggccacacgaaccataggaagcccctccaaggcctccacagcatcctctggggcggcagcctccaacatggaaaacatcacctcaacctgggcgaaatcagcagactccccagactgggcaatcttagctgcacgacggaaaacgcgggcaggaacagcctgagccgtctcctccgcatccgccaacacccagctacggtcaccaatctttaacgtgtaacctgtgtcactcatctatcaacaatccctcaaactatgtgtatcagttattagacggcggattaggatccggctcaggcttcggaggcttaggggccggaggaggagtcgggggtgtatcagcttttaaagccgtcatccacccccgaccagacaccgcatcacccttcttattaatctgggcaggatacgccttcaacgtcacaccatacccatacacctcgccattcttgcccttaatcttgtcacgatcgacaagctcaacctcagggaaatagtagcgaataacctgatcgccatcaataatatccatcaacagagcgtgcacgccagtggtggcaccaggagaaatatcgaacgaacccgaatcggatccggcagtaaccttcgactgccaaaacagttcaataacctccttcttagactcgatcagctggaaagaaatctcgatagacgactcggtagcaaccgtgcgaacaacatccgcattctgccaagccttcaaatcatcagttttacgctcaggcttaatcttaaacccgtcatccgacagataccctaaagctgtaagcccggaaggaaccgcctccacacccttaatactatcacccgcgtgcgcgtcaccaatatacacgtcgccagtaaccgctgaacgaacattagacgctttacgtgttgcagccatcacaactcccattaaatatcaaacaattacattaaaacaaaaacaataagcttattcagactccgcaggcctacatatcagctcaaaaagcgaatacacatcaaaacgtgcaccatccaccaacaaatcaggaccagcagaacgccgacaaaacaccacagggtcaccgtccacaccatcagccagcacagcctcaacacgacgcgccaacgacatagcacgatccggcatatcagaaaacacgttcacccgcaaaaacacctgctcgcgcacatgcaactgcgggccaccatccaacgccaaccagatcaggtcaccgctgaaatcctcaggcaccgtccctgtacacggtatatcggacagccatccatcatccttgagcacgcgtttagcccacacgcgaggatcaccgtaaacgatcacgacgcagccccaatcgaccgggccagcgtgccatgcttcgcctcaatacgcttcccacccttatatgtggtgccaatacgggccacagcctcaacacggtgaacctgcacctccgatgataaccctgcacgatactgggccctatcaaacgcgttaccgcccacattcgccgaggccgcacgcttgacacgctcgccacgctcagccaacatagcctgcaccccagaagacttcaacacctcacgaatacccggcaagttcagcttcacattcacatcctgagccacaatctatcagcccttcttacgcttcacattgatctgcgtaccagcatcccaaccggacatggggtgatgccacacgataggagacccgtcagactcccacacaacaccccggatacgccacctgcaacgataatcagcgcccacaacaggctgcttgaacagcatcgaccaatgctcataatccgagtcacgcaccgcggcctcatcctcctgcgaaacggaagcatagatggccacgttatggaacacagtctcgacaggcttagaccagtcttccaccttgtcaccaagatcatcgacacgaacagtcggttgaagcatcacaaccgtttcaccgtaaggaaaactggtcatatcatatctcccacaaagggccagcgtagccgttaatattcgacccgcacgaacagccgccaccccacaccgtggaacacacctcagaatgattcacgctactcctcatggtcggtgtgatagtgaacgctttaccagccccaccatcaccctcacacaacttcttcaacgcagcaatctcagaaggccacaacaaatccgtaggagtactagaccgtgtagtctgagcaaacgggcccgcagactcatactgcacctgacccgaaacgccagtatcattccagcgcaacaaagccctgcgcagaatcgccttagcggcatcccgatatttgaaatccggtttagcgatacagggggcgacactgacagccacagcctccacatcggcaatcatcgcctcaagcttctctctaggaatatcggcgaaaggctcaatatcctcaggcttcaaaatgatacccatcaacaccaccccctgcacacagcatgaaaattatcgcaacaaatagatcagttaccggccggaggattaggcttcggtgcagccttctccttcacgatagcaaacgaatccagagactcgatagccacatacaggacagcctcggcacgatccataacctcattatggcccttcaagtcacggccagtctgatccgggtcaccatactcgatcagctcgatcgggaaattgcgctggaaaccccaatgaacacgagagaaatcacccacaatagccttaacaccagagacaggcgacatctccggggcacccgaaacagtcgaagaagcaccaacattcagcccacgccaattatccaaaccagcaaacccggcggcaggatacataggctgaccggcaagcggagaccccttcggatacacctcagtagacagagcaaacgagaacgccggatccaaagcaacaccgttaggaacctgcaaaccagcaccagcgataagaccgacagccttaacaagatcggtcgtagcagaatccgtggcatcaacaacatgcgtcgtcttatccagcgaagacttgacagccgcagcaggcttacccgtagccggatcaacaccatggaaagcaatcagatcaacagcgcgaacaatcgaagcaccaagagccggggaaatcagatcctgaagcacacccagacggtaatcagcatcagcccacataaactcgtccgagacacgctgctgagtcacaaccttgataggctgcgcagtaaacgccgaaacatcaacagacgcggaaggcttaacctcgccctcaccaacaatcttagcgcgaggaacaccactaaacacggcacccttaacagggccaaaaatagtcggctgctccggcgacagcttcgccaaaacaccagaatcgatagcacggtcacgaaccgcactaatcatagaaccaggaagctcaagcttccctgcagaaagaaaatcgtcagccatcacaaatcatctcctagaattattgacaagagcatccacaaacgcgacaccctcacgtcgtttaacatcatcaacgggggcactccccgcaagacggcgcacacccgcaccaccactactatggtcgatcaaacccttcaaagccttagcagactccaccagtgcttcacgatcgtcgccgtgcagaaaagcgacagcatcacccgacaggccacactcggcagccacctcgcgcctcacaccctcaagaacaaacccgttgatccggtcttcgagttcctcattcttgcggcgaagatcatcaatcacagaccccgcatcaccatccgaggcacgaagcttctacaactcggcgaaattacttttagcacgagactcccacttacgggcctcagccttccaatccgtgccagacgccccagaagcctcacccttcacggaaacatcaccggcatgatcatcgccgacagcccgcccatccttcacaacatcaacaacgtctccaccctttccgggctcaacagcatcattgtcaacattctgttcttcaactttttgatcggccatagcctaaccctatactccttgcggaaaacaacacaacattgttgacccccgtgcgggagacaaccctgtgcaccgataaccggcgatacacaaccggaaaccatcatctcatgtcgccaacagtacgcatagccttcaaaatattgccaggcgactgctgcaacccgtgatcatcaacccattcacgagccttctcataaacacgctgatatgcggtgtccgcagaactgggctcccaacgcccaacaacctcaaccaccgtacaaccacaatgatcatgatacttcgaaccaagcggacgcttaccaccacgcttatgacgccgagtatgaccagtagtaagtgccctttccttagtcgtataatccgacctcgtagccaacatggcacaaaaagcacaaggatcaccatcagtcacccgacgccacgacctgccctgcgcaccagcagaccactcaaccgtgtcacggccagcattcatgacagcccgattcacacccgcagccatagcatcaatcgtatcattcaccctatccgggtcactattcatcatcttcatagtcgaaaacgacctagccaacgcggcggcagcatcaaactcgtcatacacgatcaaaccaggatcgacaccattaagcttccgaaaatcggacacgaacttgcccgccatagctgcggagccatcatggccggcacgctccaactccacacacaaacgcacatactgcgcatctgtcatcttcccggaacgccacaaacgaccaagctcggcataatagcccgcatacttcccggcaaaacgaatcgcctcacgctgatacctggcagcagccatccgcgacgcaacacccgaagccatcacctatcaaacctcgttcgtctgccgcgatatagccccagccagcgcagccaacggatccgaagactcggcacgatgacgcatcacagcctcaacctgcacatcatccaaacccaacatctccaacaccgtccgagaatccgccggaagaataccggcacccacaggcttcgtcacagcatcagccgtagccgcccgagtcggggtcgaagcatcacgccaacgcaaaccaacatcaccaaaaaacgcggcctcatcaacactcgaatccaacgccctcgcagccaggaaaccaaccgacaaccaaccctgaccaaacgacgtctgcctgcgttcagcacgcgtcacaagccgagactcctccgcagccaaagcctccccagaaggcgggttagacgtgataaacccgaaatagcgttccggaacagccgcctcacccgcagtcaactgcgccaacagccgcatctgatccgaatacggtgtaggagaattcacaggaaacgaccccacattcggagtgtcaccatcatcatccttatccacagcccacacagaagccatcgacaacacccagccaggctgcgaaaactcatccgcgctcacaccagtcacccaacgctgaggatacgcataaaaatcacgattcacagactgccccaacagtgtgcgcacagcctcatccgtgtaagccctaatcgacctcgtaatctccgaacggccatcaatcctagaagtacgacgacgattcacaacaggcaccaacggaaccgccccaagcacattcggtatacggcccgtctcaacccactcacgagacccacgccgctccacctgaacaatcacatcaggaagcaacaactccgcctcaacaacctcaggatcacacgtctgctgcaccacagggccagcatccaaacgagacccatcagcagaaaaccggccagtacaattcttcggcgactgcggacgaaccaacaccgacccatccccctggggaataacagccacaaacgacaacccaaaaatcagcgcatccaaatgcacatcacacgacgccgtagcaagccgattcgcagcatacacaccatccagaccgtagccgtcaccattagtccagccaagccaatccagacgctcctccaaagcatccacagcaataccaggccacgacaccaccgtctgcacacgctgcaactccggcggaatagccacccccaaatcacgcacccgattagagccctcatagtagccctcaatacgacaatgccacgaggacaacctttgaatccgatcaaacatgccctcaatccaagccaactcatccgagttcataccacagacacccgcttcctaccaccacgatcacgacggccacgcctagcctgtttagcccccataaacgccaaagacacagcctccaaaggaacctcagaaccacccttaaacgaggaaccccaaccccacgcagaacccttcttcttctgcacagccgacctcacagcaatatccaacatgtcacgcctcgaatcagccctaggatgagaaacattccaagaccttacaccctccaggaacgcctgacacgcctccacataagtgccagtatcagcaacaatcacgccacggcccggaacaccacgatccgtcaacgccttctgcaacaacaccgcaccagacccggcaaccatgatccggtcagtatcaccccaacgaaccgccaaccagtcagccaaccggcccacaccatcaacaatcgttcccgacagcccatcaatcacctcaacatgaacaccagcatcagttttaccggcgccagccaacgcgacacgatcccccgagcgagaaaacgagacaccaaacactttcccgccaaccagagccgcctcatccacagcagactgagaccacttatcagccggaatcaccgacgaagcagactggccacgatcccaccagccaagccgctcccgagcaaacccggccgcagacatcgactcatgctcatcgctcacggtcccaaaattcagacgcctacccaacgccggattagtatcaccagccaacctccgccactgccgcgacacatcatccggatcagactcgtcaggaatcgaaaactccgtccacgcaaacctcttaccacccgacaaagcctgcccacgcaaacgcaacacaaccgaaccatccgccaacggccccggcggggtaccaagaaaaatctgctgaggatcacccgaaggagccgcagacaccgtaggaagcaaagcctccaactgctcatccgacgactcctgagcctcatcacacaccaaatcatcaaccgtaaacccgcgagcagaaccccgagaacgggccacaaactcgaccgaaccccaacccggacaaccacacttacgctcaaacgtggcacaatccggatgatgcaacacaatagcctcctgaccgttcgtcgcccgaatcgacttcaccatacgataaaaatccggaaactgccgctcattctcaaaaaacgacctcaaccgcataaacgccttacgagccgacttcaactcatgagccgtatgcaaaatacgacgaccctgaatagtagccttaaacaactccacaatctccaaaatagcattcttgccattctggcgaggcacaaacaccccacacacacccgaagcaagcctgccattgctaccgacagccagccaatcatccaacacctgctgctgccacggatcaggcgtcaacccatacgcacgacccaactccccagcatcacccccagcagacaccaaatacggcgcagccacacgatgacgaggaacctgagacccaacaacaccagacacctaatcaggcccccttgcgcttcctataccggtcaatcatcgccaccgcagaacccccaccacggccaccagacaccacatcaaccgaataacgatccaacatgcccataaacgccttcacatgagcacgaggcgaagccaccaaatcagcgcgaccctcacgccacaccacatcatgaatcaccgcagcatccatgagaaacagccactcctcatcagacacgtactgcgcgcggctatcctcaccccacacacgccaccaacgacgcgtctccccacaccaatcgcgaccatcaggaagctcaggctgcacaacactcaccaccaacacaaaaagtcgacaaacagacaaaaccacaaaagggaggtatttcactaagccgtacgaggtcttgcacgcctgtgcagggggtgtccccggtggagggttggcgggtttttcaccaggagacgagtgtttttgtggtttgttgttggagtttgatgtttggttgtgttctgttgcctttgcttctgttgcatgttctgcagatgatttgcccgttgtcgagggtgttgagtcctcccctgctgacgggtgtgatgtggtcggcttcggggctggttggcagctggtgggtgtcccaggtgatggttgctccgcagagtgggcat

SEQ ID NO: 57 - DNA, 17240 bp, Pahexavirus sp.
  source 1..17240: mol_type = genomic DNA
tggcgaagctttcgccggagcagccgactatttttggccctgttaagggtgccgtgtttagtggtgttcctcgcgctaagattgttggtgagggcgaggttaagccttccgcgtctgttgatgtttcggcgtttactgcacagcctatcaaggttgtgactcagcagcgtgtaagcgacgagtttatgtgggctgacgcggattaccgtctgggtgttttgcaggatctgatttcccctgctcttggtgcttcgattggtcgcgccgtggatctgattgctttccacggtattgatcctgctactggtaagcctgctgcggctgtcaaggtgtcgctggataagacttcgaagacggttgatgcaaccgattccgctacggctgatcttgttaaggctgtcggcctgattgctggggctggtttgcaggttcctaatggtgttgctttggatccggcgttctcgtttgctctgtctactgaggtgtatccgaaggggtctccgcttgccggtcagcctatgtatcctgccgccgggtttgcaggtttggataattggcgtgggctgaatgttggtgcttcttcgactgtttctggcgccccggagatgtcgcctgcctctggtgttaaggctattgtgggtgatttctctcgtgttcattgggggttccagcgtaacttcccgatcgagctgatcgagtatggcgatccggatcagactggccgcgatttgaagggccataatgaggttatggttcgtgccgaggctgtgctgtatgttgcgattgagtcgcttgattcgtttgctgtggtgaaggagaaggctgccccgaagcctaatccgccggccgagaactgatttattgttgcggtgatgtgtccatgtgcagggggtggtgttgatgggtatcattttgaagcctgaggatattgagcctttcgctgatattcctagagagaagcttgaggcgatgattgccgatgtggaggctgtggctgtcagtgtcgccccctgtattgctaaaccggatttcaaatacaaggatgccgctaaggcgatccttcgtagggctttgttgcgctggtatgataccggggtttctggtcaagtgcagtatgagtctgcgggtcctttcgctcagactacacggtctaatactcccacgaatttgttgtggccttctgagattgctgcgttgaagaagttgtgtgagggtgatggtgaggctggtaaagcgttcactatcacaccgaccatgaggagtagcgtgaatcattctgaggtgtgttccacggtgtggggtgagggttgctcgtgcggatctgatattaacggctacgctggccctttgtgggagatatgatatgaccagttttccttacggtgaaacggttgtgaagcttcaaccgactgttcgtgtcgatgatcttggcgacaaggtggaagactggtctaagcctgtcgagactgggttccataacgtggccatctatgcttccgtttcgcaggaggatgaggccgcggggcgtgactctgattatgagcattggtcgatgcttttcaagcagcctgtcaagggtgccggttatcgttgccggtggcgtattcggggtgttgtgtgggaggctgacgggtctcctatcgtgtggcatcaccccatgtccggttgggatgctggtacgcaggttaatgtgaagcgtaagaagggctgatagattgtggctcaggatgtgaatgtgaagctgaacttgccgggtattcgtgaggtgttgaagtcttctggggtgcagggcatgttggctgagcgtggcgagcgtgtgaggcgtgcggcctcggcgaatgtgggcggtaatgctttcgatagggcccaataccgtaatggtttgtcgtcggaggtgcaggttcaccgtgttgaggctgtcgccaggattggcaccacatataagggtgggaagcgtattgaggcgaagtatggcacgttggctcgttcgattggggctgcgtcgtgatcgtttacggtgatccacgtgtgtgggctaaacgtgtgctcaaggatgatggctggctgtctgggataccgtgtacggggacggtgcctgaccggtttgagggtgacctgatttggttggcgttggatggtggcccgcagttgcaggtgcgtgagcgtgtttttttgcgcgtgaatgtgttttctgatacgcctgatcgggctatgtctttggcgcgtcgtgttgaggctgtgctggctgatggtgtggacggtgacccggtggtgttttgtcggcgtgctactggccctgatttgctggttgatggtgcacgttttgatgtgtattcgctttttgagctgatatacaggcctgtcgaatccgagtaagcgtatcgttgttttttagtttgattgttttgtagtttgattgtttttttgggggttatgatggctgaaacacgtaaagcgtctaatgttcgttccgcggttactggcgacgtttatattggtaaacctcatgccggtgatactattaagggtgtggagccggttccttccgggcttacagctttagggtatctgtcggatgacgggtttaagattaagcctgagcgtataacggatgatttgaaggcttggcagaatgcggatgttgttcgcactgtggctacggaatcgtctatcgagatttctttacagctgattgagtctaagaaggaggttatcgaactgttttggcagtcgaatgttactgccggagccgattcgggttcgttcgatatttctcccggtgccacgacgggtgttcacgccctgttgatggatattgttgatggcgatcaggttattcgctactatttccctgaggttgagttgattgatcgtgacgagatcaagggcaagaatggcgaagtgtacgggtatggtgtgacgttgaaggcgtatcctgcccagattaataagaagggtgatgcggtgtctggtcgggggtggatgacggctttaaaagctgatactccaccggttcctccttctccgaagccggagccccctaagccgcctaagcctgagccggatccgaatccgccgtctaataactgatacacatagtttgagggattgttgatagatgagtgacacaggttacacgttgaagattggtgatcgtagctgggtgttggcggatgcggaggagacggcgcatgctgttcctgcccgcgttttccgtcgtgccgccaggattgcccagtcgggggagtctgcggatttcgcccaggttgaggtgatgttttctatgttggaggctgccgccccagcggatgcggtggaggccctggaggggcttcctatggttcgtgttgccgagattttccgtcaatggatggaatacaagcctgacggtaagggtgcctcgctgggggaatagtttggctccacggcctgattgatggttatcgtggggccatcgaatacgatttccgcactaaatttggtgtttctgtttatagtgttggtggcccgcagatgtgttggggtgaggctgtccggctggctggcgtgttgtgtgccgatacgtctagccagttggcggcccacctgaatggttggcagcgcccgtttgagtggtgtgagtgggctgtgttggacatgttggatcattacaggtctgctaatagtgaggggcagccggagcctgtggcgaggccgacggatgagcgtagggcccggtttacgtctgggcaggtggacgatattttggcgcgtgttcgtgccggcggcggggtgtctcgcgagattaatattatggggtgaatagtgtatgtctggtgagattgcttccgcatatgtgtcgttgtatacgaagatgcctggccttaaaagtgatgttggtaaacagttgtcgggtgtgatgcctgctgagggtcagcgttcgggtagcttgtttgctggcgggatgaagttggctcttggtggcgccgcaatggtgggtgctatcaatgttgctaagaagggcctcaagtcgatttatgatgtgactattggtggcggtattgctagggcgatggctatcgatgaggctcaggctaaacttactggtttgggtcatacgtcttctgacacgtcttcgattacgaattcggctattgaggctgtgactggtacgtcgtatgcgttgggggatgcggcttctacggctgcggcgttgtctgcttctggtgtgaagtctggcgggcagatgacggatgtgttgaagactgtcgccgatgtgtcttatatctcgggtaagtcgtttcaggatacgggcgctatttttacgtcggttatggctcgcggtaagttgcagggcgatgacatgttgcagcttacgatggctggtgttcctgtactgcctttgcttgccaggcagacgggtaaaacgtcggctgaggtgtcgcagatggtgtcgaaggggcagattgattttgccacgtttgcggctgcgatgaagcttggcatgggtggtgctgcgcaggcgtctggtaagacgtttgagggcgctatgaagaatgttaagagcgccctgggttatttgggtgctacggctatggccccgtttttgaacggcctgcggcagatttttgttgcgttgaatccggttattaagtctatcacggagtctgtgaagcctttgtttgcgtcggtggatcaggggattcagcggatgatgccgtctgttttggcgtggattaaccgtatgccggctatgatcactcgaatgaatgcacagatgcgtgccaaggcggagcagttgaagggcatttttgcgaggctgcatttgcctgttcctaaggtgaacttgggtgccatgtttgctggcggcaccgcagtgtttggtattgttgctgcgggtgtcgggaagcttgttgcagggtttgccccgttggcggttgcgttgaagaatctcctgccgtcgtttggtgctttgaagggtgccgctggcgggcttggcggcgtgtttcgtgctttgggtggtcctgtcgggattgtgatcggcttgtttgcggccatgtttgccactaacgcccagtttcgtgccgctgttatgcagcttgtgggggttgtcggtcgagcgttggggcagatcatggccgctattcagccactgtttggtttggttgccggggttgttgcacagttggcgccagtgttcggccagattatcggtatggttgccggtttggctgcccagctggtgcctttgattagtatgcttgtcgcccggctagttcctgtgatcacgcagattattggtgcggtgacacaggttgctgccatgttgttgcctatgctgatgccggttattcaggctgttgttgctgtgatacggcaggttattggtgtggtcatgcagttgatacctgttttgatgccggttgcgcagcagattttgggtgctgtcatgtctgttttgccgccgattgttggtttgatacggtcgctgataccggtgatcatgtcgattatgcgtgtggtggtgcaggttgttgcggttgtgatacaggtggtggcccgttttcttgctgtggtggctccgatggtggcggctgtggtggggtttgttgcccgtattgttggtgctgtcgtgtcggctgtggcccgtgtgattgctgctgttgcccgtgtcgtctcatgggttgtggcccatttggtgtctggtgtggcgcatatgggttcggctatactgaatggctggaatcgtattagggcgtttacgtcttcgtttatgggcgggtttaagtcgatcatttctgccggtgttgccgctgttgtggggttttttacgcggcttggtttgtcggttgcttcccatgtgaggtcggggtttaacgcggctcgtggcgctgtttcggctgcgatgaacgggattcggagtgttgtgtcttcggtggcgtctgctgttggcgggtttttcagttcgatggcgtcttgtgttcggaatggtgctgtgcgcgggtttaatggtgcccggagtgcggcatcttccgctatgcatgctatggggtccgctgtgtctagtggtgtgcatggtgtgctgggttttttccggaatttgcctggcaatattaggcgtgctctcggtaacatggggtccttgttggtgtcggctggccgtgatgtggtgtctggtttgggtaatggtatcaagaatgctatgagtggcttgttggatactgtgcgtaatatgggttctcaggttgctaatgctgcgaagtcggtgtcgggtattcattccccgtctcgggtgtttcgtgaccaggttggccggcaggttgttgccggtttggctgaggggatcaccgggaatgctggtttggcgttggatgcgatgtctggtgtggctggtcggctgcctgatgtggtggatgcccggtttggtgtgcgatcgtctgtgggctcgtttaccccgtatgaccggtatcggcgtgcgagtgagaagagtgttgtggtgaatgttaacgggcccacgtatggtgatcctaacgagtttgcgaagcggattgagcggcagcagcgtgacgctttgaatgcgttggcttacgtgtgattgcggggtgtggttcatgtttattcctaacccgtctgatcgtgccggtttgacggtggattggacgatgtttccgttgattggtaataatccggagcgtgttcttcatttgacggattatacgggtgcgtccccggtcatgttgttgaatgattcgttgcgcggtttgggtgtgcctgaggtggagcatttttctcaaacccatgttgggtgcacggctcggagtggcgcgggtttaatgtgaagccccgggaggtgacgctgccggtgctggtgtcgggtgttgacccggatccggtgggcgggtttcgtgacggtttcatgaaagcctatgacgagttgtggtctgcttttcccccgggcgaggagggtgaactgtcggtgaagactcctgccggcaaagagcgtgtgctgaagtgccggtttgattcggctgatgacacgtttacggtggatccggtgaacaggggttatgcgcgttatctgttgcatttgacggcttatgacccgttttggtatggggatgagcagaagtttcgtttcagtaacgcgaagttgcaggattggttgggtggcggccctgttaataagaggggtacagcctttcctgttgtgttgacaccgggtgtgggctcgggctgggataacctgtctaataagggtgaagtgcctgcgtggcctgtgattcgtgtcgaggggcctttggagtcgtggtctgtggagattgatggtttgcgtgtgtcttcggactatccggtggaggagtttgattggatcactattgatacggatcctcgtaagcagtctgcgctactgaacgggtttgaggatgtgatggatcgtttgacggagtgggagtttgcgcctattcctccgggtggttcgaagagtgtgaatattgagatggttggtttgggtgccattgttgtgtcggtgcagtacaggtttttgagggcttggtgaatggttgatggctggtcttgttccgcatgtaacattgtttacgccggattatcgccgtgtggcgcctatcaatttttttgagtcgttgaaactgtcgttgaagtggaatggtttgtcgacgctggagttggtggtgtctggtgatcattccaggcttgacgcgttgactaagcctggcgcacggctggttgttgattatggtggcggccagattttttccggcccggtgcgcaaggtgcatggtgttgggccttggcggtcttctagggtgacgatcacgtgtgaggatgatatccgcctgttgtggcgtatgctgatgtggcctgtgaagaggcgtcccggttttattggttctgagtggcgtgccgacagggattacgcccactattcgggtgccgccgagtctatcgctaagcaggtgttgggggataatgcttggcggtttccgccaggtttgtttatggaggaggatgagagtcgtggccgctatattaaggattttcaggcccggttccacttgttttccgataaattgttgccggtgttgtcgtgggctcggatgactgtcacggtgaaccagtttgagaatgcgaagtctgatcagcgtggtttgctgtttgattgcgtgcctgctgtgacgcgtagtcacgtgttgactgccgagtctggttcgattgtgtcgtgggagtatgtgcgtgatgccccgaaggcgacatctgtggtggttggtggccgcggcgagggcaaggatcggctgttttgcgaggatgttgattcggcggccgaggatgactggtttgatcgtgtcgaggtgtttaaggatgcccgtaacacggattctgagaaggtgtctcttttcgatgaggctgagcaggtgttggggagttgcaggcttcgtcggggtttaagatcgagttggccgagtcggatgtgttgcggtttgggcccggcaagctgatgcccggggatttgatctatgtggatgtgggttctggccctattgcggagattgtgcggcagattgatgtggagtgtgattcgcctggtgacgggtggacgaaggtgactcctattgcgggggattatgaggataatccgtcagcattgttggctcgccgtgttgccggtttggctgccggtgtgcgggatttgcaaaaattctaattgttaggggtttgttgtgggtattgtgtgcaagggttttgatggtgtgttgaccgagtatgattgggctcaaacgtctggtctgatgggtaatatgccgtccgtaaaaggcccggatgattttcgtgtcggcaccacgattcagggttccacggtgttgtgtgaggtcctgccggggcaggcttgggctcacggggtgatgtgcacgtcgaatagtgtcgagacggtgacggggcggcttccgggcccgggtgagacccgctacgactatgttgtcctgtcgcgggattggcaggagaatactgccaggttggagattgttcctggcgggtcttcggagcgtgcccgtgacgtgttgcgtgccgagcctggcgtgtatcatcagcagttgttggctactttggtgttgtcgtctgacgggttgcagcagcagcttgacaggagggctgtggcggcccgtgtggcgtttggcgagtctgctgcgtgtgacccgaccccggtggagggtgaccgtgtgatggttccttctggggctgtgtgggctaaccatgccaacgagtggatgctcctgtctcccaggattgagacgggttctaagtcgatcatgtttggcgggtctgctgtgtatgcttacatgattccgtttgatcgccagttcagtagtccgcctgttgtgtggcgtctatggctacggcggctagtggtacgcagcagattgatgtgaaagcctacaatgtgactgccaaggatcttagtttggcgtttattacgaatgatgggtctaagccgaatggtgtgcctgcggcggctaactggattgctgtcggcgtgtaatgtacggcttgcgtggcgtgttgtggtggttgtagtggtagggggctgtagtgtcacggtttacacctacgcttgtggcctctctttgtaccgctatcgctactgttcttggttcgattcaggcggctacgtacaggtcgaagaagaggcttaggcagttgtctgcgcaggttgatgcgatggaagagtacacgtggaatattcgccatattgttcaccgctataacgcgaatttgccggagaatgttgagccggtgaagatgcctgatttgcccgagtttttgaaagatactgttgatggtggaggtgagtagggttgagggagttggaggaggagaagcggcagcgccgcaattttgagaagttttcactggtgttgctgtttttgtcgcttgtgttgttggcggtggttgctgcgggtgctttgcggtatggttctgtggcttcccagcgggattcggagcaggcgagggcccagtctaatggtacggctgccaggggtttggctgcccgcgtgcggcaggtgcgtgcttctggtgggcgggagtctgtgcggcttcaccagtctggtttgtgtgtggatgctcagcgtgttgagcggagtgtgcagggtgtgcctggcccggccggtgagcgcggcccgcaagggcccgctggtgttgatggccgggatggtagcaatggttctgctgggctggttggccctgttggtccgcagggttccccgggtttgaatggtgtgaagggtcctgacgggctgcccggcgctaacggttcggatggccgtgatggtgtttcgggccgtgcaggtgctgatggtgtgaacggagttgacggcgctgatggtcgtgatggttcggctggtgagcccggtgatgtggggccttctggtcctgccggcccgcaaggtgcacagggggagcgtggtgagcgtggccccgcaggtgtgaacggatccgacggtaaagacggtaaggatggccgctcggtagtgtctgtgtactgttccgggggccgcctggttgtgaaatatagtgacggtacggcctctaccgtgtcgggttcggttgcctgcgagagtgtgaaaccatcacctgttgttacagtgtcatcccgcaagtgagagaggaagggtgttactgatgttggtcatgtttgggggtggcgtgttgtgagatacattcctgcggcgcatcactcggccggatcaaataagccggtgaaccgtgttgtgattcacgcgacatgcccggatgtggggtttccgtctgcctcgcgtaagggtcgggcggtgtctacagcaaactattttgcttccccatcgtcggggggttcggcgcattacgtctgcgatgtctctgagacggtgcagtgcttgtcggagtctacgattgggtggcatgccccgccgaatccgcatagtttgggtatatagatttgcgcggatgggggttcgcatgcctcgttccgtgtaccggggcatgcttacactcgggggcagtggcttgatccgcgggtgtggcccgcggtggagagggccgccatcctgtgtcggcagttgtgtgataagcatggtgttccgaagaggagactgtctgtggctgatttgaaggccggtaaacggggtgtttgcgggcatgtggatgttacggatgcgtggcatcagtcggatcatgacgatccggggccgtggtttccgtgggacaggtttatggccgtcgtcaacggcggcagtggagagaatgaggagttaacggtggctgatgtgaaagccttgcatgatcagattaaacaattgtctgctcagcttactggttcggtgaataagctgcaccatgatgttggtgtggtgcaggtgcagaatggtgatttgggtaaacgtgttgatgccctgtcgtgggtgaagaatccggtgtctgggaagctgtggcgcaccaaggatgctttgtggagtgtctggtattacgtgttggagtgtcgtagccgtcttgacaggctcgagtctgctgtcaacgatttgaaaaagtgatggtggtttgttgtgggtaaacagttttggttaggtttgctggagcgggcgttaaagacttctgctcaaacgtttgtggctgtgttgggggttaccgcgggtgtcacgtatactgcggagtcgtttcggggtttgccgtgggaatcagctttgattacggccacggttgctgcggtgttgtcggttgctacctcgtttggtagcccgtcgtttgtggctggtaaacctaaaaccacggttgtggatgcgggtttggttccgcccgatgacgggggcatggttgagccgcacatggtggatgtgtcggatcctggcatgattgagcctgcagatgatgtggatggttttgccggctatgtgcctcggcgtgcagccgagtctgaggttggcacggtagagtctactgttgcataagtgaatatagatgtgtgccccagcggtgctgccacgattgtgtggtggttgccgctggggcactatttttgtatattgcggtgtggctatgattcgttgctgtcgatggtgtcttcgagcatctgatacaggtggaggcaggtagagatagtttcgctggcctggtctagaacgttccggccgataacatttttgtggttgtcgcggtggcggatgatagcccacatgatctcgtcggctgccgattgtagtagtttggcctggtatgcgattccggcgagccagtctagcgcctcctggcttgcataggggctctggtcctcgctcttgccacgggtgttgctgttgtttgggtgtcctgcactgtcgcagaaccataggatttcgctgcactcgtctagcgtgtcttggtcgatagcaagatcgtcgaggctgacattgttgacggtaaggttcacgttgtcgagggagatgggtacaccgtactggttttcgacactgtcaacaatgttttgtagttgttgcatgttggtgggctgttgttggacgatgcggtgtatcgctgtgttgagggtggtgtaggtgatgttgtgtgtgttgttcatggttttatcccatccctgtgctgtcgtcgttgccgtctggatagtatctactgtttgcgtagcctgttagggtgatgagtgtttggtctgcccactgtttcacggtttgccgggtgacacccaatcgttgggcggcggcggcgtaggtttggtcgtatccgtatacttcacggaatgctgccaaccgtgccaaatgttttcgctgtttggatggttccccggtgcgggtgttgtcgtcgttggctagctgtagatcgctcctggtgccgatgttggtgccgggaggcgggggggcggtggggggggggggcattcctggttcgacgtatggtttccatggtccgccgttccagatccattgggcggcttggatgatgtcggcggtggtgtaggttcggctcacttggtcaccccctgaacatgttgtccaggttgttggtgttgctggtgtcgaatcgtccgacgcagtggcagtagtcgtacatgagtttaatgacgtgttggtggtcgccgaggtaggtgtttccgctgatgctgtaggttgctgtgccgtctttgctgatggtgtattttgcggtgatggtttcgggtgtttctgtgttggtgatgatggcggtggtggtggagcctactgtttgtagcctggtggtttgggttccgtcgtcgaggatggttgtgaccatggtgtgtgttctcctttttaaatgctggtttggttgtcggctagatgaataatatcgggtaaaggtttcggttggtctaggtgttgtatggttttgttggctagccgtttggctaccctgtagcacattttggtgtagtgtttgttgtctaggttgtggtattgttcccgcaccgcaatatatagtagagagtcttggtagaggtcgtctgcactgattgcggggtagtgtgcggctgttttggtgcatgcccggttgagtgtgcgtagatgatggtctgtggcccaaacccacgatgcggtggtggcgaggtctgctttggttggtcgtcggctcatggcatctctttcaccgggctatctggtagttgtttggtgttttgttgttgatagtgtagcacacgagtccggggtttccggtggtgccagtcttgtgccggtaccatgtggattcgccttccatggatgggcattggatgaaggtgcgttgtccttgctcggagatttctaggtggtgccggtgcccggccatgagaatattagatctggtgccgttgtggaattcttggccgcgccaccaatcatagtgtttgccggtgcgccattggtgtccgtgggcgtgcaggatttgtgtgccggccacatcgacggtggtggtcatttcgtctcggctggggaagtgcaagtgaaggttggggtattggttgttgagctggtaggcttctgcgatggcccggcagcagtccacgtcgaaggagtcgtcgtaggtggtgacgcctttgccgaatcgtacggcttctccgtggttgccgggtatggatgtgatggtcacgtttttgcagtggtcgaattggtggatgagttgcatcatggccatgcgggtgagcctgatttgttcggtcaggggggtttgtgtgcgccaggcgttgttgcctccttgtgacacgtatccttcgatcatgtcgccgaggaatgcgatgtggactcgttgcggtttgcctgcctgttgccagtagtgttttgcggctgtgagggagcgcaaatagtcgtcggcgaagtgtgctgtttctccgctggggatgcctttgccgatttggaagtcgcctgccccgatgacgaaagccgtatcgtcactggactcccgggtgtgggtgtctggttgtggtggctgccagcaggctagcatagctacgagttcatctacagggtaggggtctgttgcgggttggtggtcgatgattttttgtatggatcggcctgtttctccgttgggtaaggtccattcagagatgcgtgtgcggcgtacggtgccgttggctagattgtcgtcgatggtgtcgatggcgttgtcgtggttggctagctgtgtgaggagccggtcaatgttgtctatcatcgggtatcctcctctcgtggggtggtggtggcttgtttgcggcggtagtctttgatgacggtggcggagatggggtatccggcttcagtgagcatttgggctagctgtgtggcggggatagacttgtcggcgaggacgtctgcggctttagccccgtagcgttggatgagtgtttcagttttggttgccatgatgtcctaggggttgtgtggtgggctgccatcctgtgcggcagtcgccgtcgtgtcctggtttgcgtgtgcaccacgatgttgttccgtctgtgtggttgagtgttttaccgcacatgacgttttggagatgctccggcagtgtgccgttattctggttgctggtttgtgtgtcgaagagtgttttttggttggtgaaatgctcggacacggtgccgttatgtacgggtagtatccatgttttccattgttgttgtagcctggtgttccagtggaattgtttggccgcgttcgtggcttgtttagcggttttgtagtagccgactagtatgcgctgatgtttactgtcgagtgggttttggcctcgccagtattgtgccgccacggcgtagcggttgttgtctgtgaagcgctgccagcagtactcaataatgtgtgataacaccttgtcgggcatgtctcgtacttggttttcgtcgagccacgcgtcgacaatgatgttgcgtatggctcgcttgtctttggtggtgggtttgaatgctatgctcacaatgctggcctgtcgtcttgcatgaaatcattaaaggatgattcgcttgtgcggcgtgcttgcgtgatttgctggtcagtccagtcggggtgttgctgtttcagatagtgccagtggcacgcattgtaggtctcgtcttgtagccgtgtgagatggttttcggtgatgatttgtttccacatggcccatgacacgtcgagccggttgaggatttcgagggctgggatgttgaactggtcgaggaagaggatttcgtgggtgtagtagtttttctcgtaggcgtcccatccgcttcggtgcctgttgggctggtttttggggtaggcttcccggcagattttgtgtaaacgtttggccatgtcgtcgggtagcttgatgtcggggttggcgcggatcatggatcgcatcccgtcataggtggtgccccaggtgtgcatgatgcggagtgggtccacgccgtcggcccatttttctgcacagatggcgaggcgtatgcgtctcctggcggccttggaggtgtcgcggcggccggggatggggcaggtgtcgaggggatccatgatgttttagtgtacctttccgtgttgtggttgtttgtctggttttattgtagcactgtgttgagggcttgtgtcaaccctgttttgccggcttgaaggtaggtgtctgtgacatcccccagggtgaggggcacatgggtggcttgcggtagtgcttgggttagggtttgggccatctggtctcccgctttgtctgggtcggaccatatgtagatgtggtcgtagccttcgaagaatttggtccagaaggtttgccacgaggttgcgccgggtagtgcgacggccggccatccgcattgttcgaggatcatggagtcgaattcgccttcgcagatgtgtatttcggctgccggggtggccatggcggccatgttgtagatggagcctgtgtctccggctggggtgaggtatttggggtggttgtgggttttgcagtcgtgcgggagtgagcagcggaaacgcatttttcgtatttcggctggctcgccccatgtggggtacatgtaggggatggtgatgcactggttgtagtcttcgtggcctgggatggggtcgttatcgatgtatccgaggtggtggttgcgggctgtttcttcgctgatgcctcttgccgagagcaggtcgagtatgttttcgaggtgggtttcgtagcgggttgaggctttctggattcggcggcgttccgcaatgttgtatgggcgtatgctgtcgtacattcgggttttcttcttctaatcgttgttgtagcttggcgagtccgcctccgacaccgcatgtgtggcagtaccagacgcccttgtcgaggttgatgctcatggagggccggtggtcgtcgtggagtgggcagagtatgtgttgctcgttcctggacgggttgtaccgtatgtggtaggtgtcgaggaggcggcaggtgtcagaggtgtgggaggagttctgtgagggttgataccacataggcttcgctccagggtttgttgcgctgtttcatgacgacgagtccgatggtggactggctttctcggtttcggtgggtttcgtagttgcgtgcctcccggctggcttgtttcacgaattcggcgaggtgtggctgcccggctttcgcctcgatcacataggttttgtggccggttttgaggatgaggtcgccttcgtcctctttaccgttgaggtggaggcgttcgatgtcgtagccggtttcgcgtagctggtggaggattctggtttcccattctgcgcctgcccgccggttgcgtgactgttgtgttgacatgatagtcc

SEQ ID NO: 58 - DNA, 10238 bp, Pahexavirus sp.
  source 1..10238: mol_type = genomic DNA
cacaccatcgaccgcaacgaatcatagccacaccgcaatatacaaaaatagtgccccagcggcaaccaccacacgatcgtggcagcaccgctggggcacacacacatattcacttatcattcaatcggctctaccgtgccaacctccgactcggcggcacgccgaggctcttagccggcaaaaccatccacatcatctgcaggctcgatcatgccaggatccgacacatcaaccaggtgagactcaaccatccccccatcatcgggtggaaccaaacccgcatccaccaggggctgcctgccaggcttaccggccacaaacgacgggttaccaaacgaggtagcaaccgacaacaccgcagcaaccgtggccgtaatcaaagctgattcccacggcaaaccccgaaacgactccgcagtataggtgacacccgcagtcacccccaacacggcaacaaacgtttgaacaaaagttttcagggcacgctccaacaggcccaaccaaaactgtttaaccatcacacatcaccatcactttttcaaccggttaacgtccgcctcaagccgggcaagacggctgcgacactccagcacgtaataccagacactccacagggcatccttagtgcgccacagcttccccgtcaccggattcttcacccacgacaaggcatcaacacgcttacccaaatcaccattctgaacctgaaccacaccaacatcgtggtgcagcttattcaccgaaccggcaagctgcgcagacaattgtttaatctgatcatgcaaggctttcacatcagccacagttaactccccactatcactactactaccgccgcagactacggccataaacctgtcccacggaaaccatggccccggatcgtcatgatccgactgatgccacgcatccgtcacatcagtgtgcccgcacacacccctcttgccagccttcaaatcggatacgctaagcttccttttcggaacaccatgcttgtcacacaactgcctgcacaacaccgccgccctctccaccgcgggccacacccgagggtcaagccactgctccctcgtgtaagcatggcccggcacccggaacgaggcgtgcgaacccccatccgcgcaaatctctatacctaaactatgaggattcggtggggcatgccaaccaatcgtagactcggacaggcactgcaccgtctccccaacatcacacacataatgggcagaaccgcccgccgatggggaagcaaaatagttcgctgtagacactgcacgaccagccctagacgcggacggaaaccccacatccgggcatgtcgcatgaatcacaacccggttcaccggactattcgaaccggcagagtgatgcgctgcaggaatgtatctcaccgcatgtcaccaccaaacactactatcaacaccagtaacacccttcccttttcttttttacttgcgggatgacacggtaaccacaggcgacggtttcacactctcgcaggccaccgaacccgctatggtagaggccgcaccgtcactatatttcaccaccaggcggcccccggaacagtacaccgatatcaccgagcgcccatccttaccgtccttaccgtccttgccatcccgaccattcgtgccgtcggcgccggcagaaccctgcggacctacaggacccacaggaccggcagggccacgctcaccctgttcaccctgtgcaccgtcagcgccagccggcccttgcgggccacgaccaccatcagccccatcagcgccatccctaccaggcacaccatcacggccatcagcaccagcacgacccggaacaccatccttgccgtcagcgccaggcaacccttgcgggccagccacaccattcaaacccggagacccctgaggaccaacaggcccaaccagcccagccgaaccatcaacaccagccggcccctgcgggccttgcgggccacgcacaccagccgggccaggaacaccctgcacactctgctcaacacgctgagcatccacacacaaaccagactggtgaagccgcaccgactcctgcccgccagaggcacacacccgcttcacacgggcagccaaccctttggcggctgcaccattagactgggctttagtctgctccgaatccctttgggaagccacagaaccgtaccgcaaggcacccccagccatcgccaccaacagcacaagcgacaagaacagcaatatcagggaagccttctcaaacgagcggcgctgccgcttctcctcctccaactccctcacaattcaccccccaccaccatcaacagtatccttcaaaaactcgggcaaatcaggcatcttcacaggctcaacattctccggcagattcgcgttatagcggtgaacaatatggcgaatattccacgtgtactcttccatcgcatcaacctgcgcagacaactgcctaagccgcttcttcgacctgtacgtaaccgcctgaacagaacccaaaaccgtggcgatagcggtacaaatagaggccacaagcgtaggtgtaaaccatgacactacagccccctaccactacaaccaccacaacacgccacgcaagccgtacattacacgccgacagcaatccagttagccgccgcaggcacaccattcggcttagacccatcattcgtaataaacgccaaactaaaatccttggcagtcacattgtaggctttcacatcaatctgctgcgtaccactagccgccgtagccatagacgccaccacaacaggcggactactgaactggcgatcaaacggaatcctgtaagcatacacagcagacccgccaaacatgatcgacttagaacccgtctcaatcctgggagacaggagcatccactcgttggcatggttagcccacacagcccccgaaggcaccatcaccctgtcaccctccacaggggtcgggtcacacgcagcagaccccccaaacgccacacgggccgctatagcacgccgatccagctgctgctgcaacccgttagacgacaacaccaaagtagccaacagttgctgatggaacacgccaggctccgcacgcaacacgtcacgggcacgctccgcacgcccaccgggaacaatctccaacctggctgtgttctgctcccaatcccgcgacagaacaacatagtcgtagcgggtctcacccgggcccggaagccgccccgtcaccgtctcaacactattcgacgtacacatcaccccgtgagcccaagcctgccccggcaggacctcacacaacaccgtgttaccctgaacagtagtgtcgacgcgaaaatcgtccggccctttcacagactgcatattacccatcaaaccagacatttgagcccaatcaaactcggtcaacacaccatcaaaacccttgcacacaatacccacaacaaacccctaacaattagaatttttgcaaatcccgcacaccggcagccaaacccgcaacacggcgagccaacaatgctgacggattatcctcataatcccccgcaataggagtcaccttcgtccacccgtcaccaggcgaatcacaccccacatcaatctgccgaacaatctccgcaataggccccgagcccacatccacatagataagatcaccgggcatcagcttgccgggcccaaaccgcaacaccttcgactcagcaagctcaatcttaaaccccgacgtggccccagactcggccagcacccgctcagcctcatcggcaagaaacgcatcctcatccgtgttacgggcatccttaaacacctctacacgatcaaaccactccccctcagacaagctatcaacatcctcacaaaacagcctatccttgccctcgccgcggccacccacaaccaccgacgtcgccttaggggcatccctcacatactcccacgacacaatcgaacccgactcggcagtcaaaacatgactacgggtcaccgcaggcacacaatcaaacaccaaaccccgctgatcattcaccttatcctcaaactggttcaccgaaacagtcatccgataatacgacaacaccggcaacaacttgtcagcaaacacatgaaaccgggcctgaaaatccttaatatagcggccacgactctcatcatcttccataaacaaatccggcggaaaccgccaagcattatcccccaacacctgcttagccaccgactctgccgcaccagaatagtgggcataatccctgtccgcacgccactccatcccaatgatgctggaacgataaggcacaggccacaacagcatacgccacaacaggcgaatatcatcctcacacataatagtcacccgagaggactgccaaggcccaaccccgtgcaccttacgcacaggcccagaaaaaatctggccaccaccataatcaacaaccagccgtgcacccgggctagtcaacccgtcaagcctcgaatgatcaccagacaccaccaactccagcgtcgacaaaccattccacttcaacgacagtttcaacgactcaaaaaagttgataggcgccacgcgacgataatccggtgtaaacaatgttaactgcggaacaagaccagccatcaaccattcaccaagccctcaaaaacctgtactgcaccgacacaacaatggcacccaaaccaaccatctcaatattcacactcttagaaccgccaggcgggataggcgcaaactcccactctgtcaaacgatccatcacatcctcaaacccatccagtagcgcagactgctgccgaggatccgtatcaatcgtgatccactcaccctcctccaccggattatcctaagacacccgcaaaccatcaatctgcacacaccacgactccaaaggcccctcaacacgaatcacaggccacacaggcacatcacccctgttagacaagttatcccagccagaacccacacccggtgtcaacaccaccggaaacgccgtgccatccttgccgacagggccgccacccaaccaatcctgcaacttcgcgttactgaaacgaaacttttgctcctccccataccaaaacgggtcataggctgtcaaatgcaacagatagcgggcatagccacgattcaccggatcaaccgtaaacgtgtcatccaccgaatcaaaccggcacttcaacacacgctcacgaccggcaggagtcttcacagacaactcaccctcctccccaggaggaaacgcagaccacaactcgtcataggctttcaaaaaaccgtcacgaaacccgccatccggatcctcgtcgacacccgacaccaaaaccggcaacgtcacctcgcgaggcttcacattaaacccgcgccactccgaaccatgcaccccaacatgcgtttgagaaaactgctccacctcaggcatacccaggccgcgcaacgaatcattcaacaacatgaccggagacgaccccgtataatccgtcaaatgaagcacacgctcgtcgccaaacagcggatccatagaccaagtaacagtcaaaccggcacgatccgacgagtcaggaagaaacatgaacaacacccccaatcacacgtaagccaacgcattcaaagcgtcacgctgctgccgctcaatccgcttcgcaaactcgttaggatcaccatacgtcggtccgttaacattcaccacaacactcttatcattcatgcgctgatacctgccatacggtgtaaacgagcccaccgacgatcgcacaccaaaccgggcatcaaccgcatcaggcaaccgaccagccacacccgacatagcttcaaacgccaaaccggcattcccggtgatcccctcagccaaaccggcaacaacctggcggccaacctggtcacgaaacaccctagacgggggatgaatacccaacaccgactccgccgcattagcaacctgagaacccatattacgcaccgtatccaacaagccactcatagcattccggataccattacccaaaccagacaccacatcacggccagcagacaccaacagagaccccatgttacccaaggcgcccctaatattgccgggcagattccggaaaaaccctaacacactatgcacaccactagacacagcagaccccatagcatgcatagcagaagaagccacactacgggccccattaaacccgctagaggctgcaccacgaaccctagacgccatcgacccaaaaaacgagcccaccgcggacaccaccgaggacaccacactacgaatcccgttcatcgcagccgaaacagcgccacgggccgcgttaaaccccgacctcacatgggaagcaaccgacaaaccaagccgcgtaaaaaaccccacaacagcggcaacaccggcagaaatgatcgacttaaacccgcccataaacgaagacgtaaacgccctaatacgattccagccattcagtatagccgaacccatatgcgccacaccagacacaaaatgggccacaacccatccaatgacacgggcaacagcagcaatcacacgggccacagccgacacgacagcaccaacaatacgggcaacaaaccctaccacagccgccaccatcggagccacaaccgcaagaatacgggccaccacctgtatcacaacagcaacaacctgaaccaccacacgcataaccgccgcaatcacaggcatcaacgaccggatcaaaccaataatcggtggcagcacagacatcacagcacccaaaatctgctgaatcacaggcatcaacaccggcaccaactgcgacacaacaccaacaacctgccgtatcacagcaacaacagcctgaataaccggcatcaacgtaggcagcaacatggccgcaacctgcgtcaccatgccaataatctgcgtgatcacaggcaccagccgggccaccagcataccaatcacaggcatcaactgggcagccaaaccggcaaccatgccgataatctgggcaaacactggcgccaaccgtgccaccagccccgcaaccaaaccaaacagcggctgaagagcggccataatctggcccagggcttggccaaccacagccacaagctgcatcacagcggcacggaactgggcgttcgtagcaaacatggcagcaaacagcccgatcacaacaccgacagggccacccagggcacggaacacgccgccaagacccccggcggcacccttcaaagcaccaaacgatggtagcagattcttcaacgacaccgccaacggggcaaaccccgcaacaagcttcccagcacctgcagcaacaacaccgaacacggcggtgctgccagcaaacatggcagccaaattcaccttagggacaggcaaatgcagcctcgcaaaaatgcccttcaactgctccgccttggcgcgcatctgtgcattcattcgtgtgatcatagccggcatccggttaatccacgccaaaatagacggcatcatccgctgaataccctgatccaccgacgcaaacaaaggcttcacagactccgtgatagacttaataaccggattcaacgcaacaaaaatctgccgcaggccgttcaaaaacggggccatagccgtagcacccaaataacccagggcgctcttaacattcttcatagcgccctcaaacgtcttaccagacgtctgcgcagcaccacccataccaagcttcatcgcagccgcaaacgtggcaaaatcaatctgccccttagacaccatctgcgacacctcagccgacgttttacccgtctgcctagcaagcaaagacagaacaggcacaccagccatagtaagctgcaacatgtcatcgccctgcaacttaccgcgagccataaccgacgtaaaaatagcacccgtatcctgaaacgacttacccgaaatataagacacatcggcgacagtcttcaacacatccgtcatctgcccgccagacttcacaccagaagcagacaacgccgccgcagtagaagccgcatcacccaacgcatacgacgtaccagtcacagcctcaatagccgaattcataatcgaagacgtatcagaagacgtatgacccaaaccagtcagtttagcctgagcctcatcgatagccatagcgcgagcaataccgccaccaatagtcacatcatagatagacttgagacccttcttagcaacattgatggcacccatcattgcggcgccacccaaagccaacttcatcccggaagcaaaaagactacccgaacgctgaccctcagcaggcataaccccggaaagctgtttaccaacatcagctttcaaaccgggcatcttcgtatacaacgacacatatgcggaagcaatctcaccagacatacactattcaccccataatattaatctcgcgagacaccccgccaccggcacgaacacgcgccaaaatatcgtccacctgcccagacgtaaaccgggccctacgctcatccgtaggcctcgccacaggctccggctgcccctcactattagcagacctgtaatgatccagcatgtccagtacagcccactcgcaccactcaaacgggcgctgccaaccattcaggtgggccgccaactggctcgacgtatcggtacacaacacgccagccagccggacagcctcaccccaacacattatcgggcccccaacatcataaaccgagcaaccgcaccgggtcctccaatcatattcgatggccccacgataatcatcaatcaggccgtggagccaaattattcccccagcgaggcacccttaccgtcaggcttatattccatccactcacggaaaatctcggccacacgaaccataggaggcccctccaaagcctccacagcatcctctggggcggcagcctccaacatggaaaacatcacctcaacctgggcggaatcagcagactccccagactgggcaatcctggcggcacggcgaaaaacgcgggcaggaacagcctgcgctgtttcctccgcatccgccaacacccagctacggtcaccaatcttcaacgtgtaacctgtgtaactcatctatcaacaatccctcaaactatgtgtatcagttattagacggcggattcggatccggctcaggcttaggcggcgtaggaggagtcggaggagtatcagcttttaaagccgtcatccacccccgaccagacaccgcatcacccttcttattaatctgggcaggatacgctttcaacgtcacaccatacccatacacctcgccattcttacccttaatctcatcacgatcaatcaactcaacctcagggaaatagtagcgaataacctgatcgccatcaataatatccatcaacagggcatgaacacccgtcgtggcacccggtgtaatatcgaacgaacccgcatcggctccggcagtaaccttcgactgccaaaacagttcgataacctccttcttagactcgatcagctggaaagaaatctcgatagaagactccgtagccacagtgcgaacaacatccgcattctgccaagccttcaaatcatccgttttacgctcaggcttaatcttaaacccgtcatccgacagataccctaaagcagtcaacccatccggaaccgtcttcacaccatcaatagtgtcaccagcgtgggctttaccaatatagacgtcacccgtaacagcagagcgaacattagacgccgtacgtgtagcagccatcacaacccccaagaaacaatcaacaaaaacaataaaactaaaacaataaacaaatacgtttactcagactctacaggccgacacaccagctcaaaaagcgaatacacatcaaaacgtgcaccatcaaccaaaagatcagggccagtagaacgccgacaaaacaccaccgggtcaccatccacaccatcagccagcacagcctcaacacgcctggctagcgacatagcacgatccggcatatcagaaaacacattcacacgcaaaaacacacgctcacgcacatgcaactgcgggccaccatcaagagccaaccaaatcagatcaccgctgaaatcgtcaggaaccgtccccacacaaggtatcccagccagccagccatcatccttgagcacacgtttagcccacacacgcggatcaccataaacgatcacgacgcagccccaatcgaccgggccagcgtgccatgcttcgcctcaatccttttacaacccttataggtggtgccaatacgggccacagcctcgacacggtgaacctgcacctccgacgacaaacctgcacgatactg

SEQ ID NO: 59 - DNA, 16345 bp, Pahexavirus sp.
  source 1..16345: mol_type = genomic DNA
cagcagttggcgccagtgttcggccagattatcggtatggttgccggtttggctgcccagctggtgcctttgattagtatgcttgtcgcccggctagttcctgtgatcacgcagattattggtgcggtgacacaggttgctgcaatgttgctgcctgcgttgatgccggttattcaggctgttgttgctgtgatacggcaggttgttggcgtgatcatgcagttggtgccggttttgatgcctgtgattcagcagattttgggtgcggtcatgtctgttctgccgcctatcatcggccttatccggtcgctgataccagtcatcatgtctgttatgcgtgtggtgatgcaggttgttggtgtcgtgctacaggtggtggcccgcattattccggttgtgatgccgattgtgacagctgtgatcgggtttgtggcacgtattcttggcgctattgtgtctgctgcagcccggattattgggactgtcacccgtgtcatttcatggattgtgaatcatctggtgtctggcgtgaggcctatgggcacggccatcttgaatggctggaatcatattagagcgtttacgtctgcgtttattaacggtttcaagtcggtgatttctggcggcgtgaacgcggttgtggggttttttgcccggcttggttcttcggttgcttctcatgtgaggtctggttttaatgcggctcgtggtgctgtttcttctgcgatgaatgcgattcggagtgttgtgtcttcggtggcgtctgctgttggcgagtttttcgggtcgatggcgtctagggttcgtagtggtgctgtgcgcgggtttaatggcgcccggagtgcggcttcttctgctatgcatgctatggggtcagctgtgtctagtggtgtgcatagtgtgataggttttttccggaatctgcccagcaatattaggggcgccctgggtaacatggggtccctgttggtgtctgctggccataatgttgttgccggtttgggtaacggtattaagaatgctatgagtggcctgttggatacggtgcgtaacatgggttcccagattgctaatgctgcgaagtctgtgttgggtattcattccccgtctagggtgtttcgtgaccaggttggccgccaggttgttgctggtttggctgagggtattactggtaatgctggtttggcgttggatgcgatgtcgggtgtggctggtcggctgccggatgctgtggatgcccggtttggtgtgcgatcgtctgtgggctcgtttaccccgtacgaccggtatcggcgtgctcagggtgagagtgttgtggtgaatgtgaatggcccgacgtatggtgatcctgccgagtttgcgaagcggattgagcggcagcagcgtgacgctttgaacgcgttggcttatatgtgagtaaaggggtatgcatgtttattcctgacccgtctgatcgtgccggtttgactgtggattggactatggatccgcggtttggcgatgagcgtgtgcttcacttgacggattatacggggttgtctcctgtcatgttgttgaatgattcgttgcgcggcctgggtatgcctgaggtggagcatttttctcaaacgcatgttggggtgcacggttcggagtggcgcgggtttaatgtgaagcctcgcgaggtgacgctgcctgtgttggtgtcgggtgttgaccctgatccggctggcgggtttcgtgacggttttttgaaagcctatgacgagttgtggtctgcgtttcctcctggcgaggagggggagttgtcggttaaaaccccgtctggtcgtgagcgtgtgctgcggtgtcggtttgattcggtggatgacacgtttacggttgatccggtgaatcgtggctatgcgcgttatgtgcttcatttgacagcttatgacccgttttggtatggggatgagcagaagtttcgttttagtaacgctaagttgcaggattggttgggtggcggccctgtcggcaaggatggcacggcgtttcctgtggtgttgacgcctggtgttggttcgggttgggataacctgtctaacaggggtgatgtgcctgcgtggcctgtgattcgtgttgaggggccgttggagtcgtggtctgtgcagattgatggtttgcgtgtgtcttctgattggcctgtcgaggagtatgattggatcactattgacacggatcctcgtaaacagtctgcgttgttgaatgggtttgaggatgtgatggatcgtttgacagagtgggagtttgcgcctattccgcctggcggttctcggagtgtgaatattgagatggttggtttgggtgccattgttgtgtcggtgcagtacaggtttttgagggcttggtgaatagttgatggctggtcttgttccgcagttaacattgtttacgccagactatcgccgtgtggcgcctatcaatttttttgagtcgctaaagttgtcgttgaagtggaatggtttgtcgacgctggagttggtggtgtctggggatcattctaggttggatgcgttgacgaagccgggtgcacgcctggttgttgattatggtggcggccagattttttctggaccggtgcgtaaagtgcatggtgtcgggccttggcggtcttctagggtgactgtcacgtgtgaggatgatattcgcctgttgtggcgtatgttgatgtggcctgtgaattatcgtcctggtttggtggggtctgagtggcgtgcggacagggattatgcccactattcgggtgcggctgagtcggtggctaagcatgtgttgggggataatgcgtggcgttttccgcctggtttgtttatgaccgatgatgagagtcgtggccgctatattaaggcttttcaggcccggtttcatgtgtttgccgataaactgttgccggtgttgtcgtgggctcggatgactgtcacggtgaaccagtttgagaatgcgaagtttgatcagcgtggtttggtgtttgattgtgtgcctgctgtgacccggaagcatgggttgactgccgagtctgggtctattgtgtcgtgggagtatgtgagggatgccccgaaggccacatcggtggttgttggtggccgcggcgagggcaaggataggctgttttgtgaggatgtggatagcttgtctgagggggagtggtttgatcgtgtagaggtgtttaaggatgcccgtaacacggatgaggatgcgtttcttgccgatgaggctgagcaggtgttgtctgagtcgggggccacgtcggggtttaagatagagttggcggagtcggatgtgttgcgttttgggcccggacggttgatgcccggggatttgatttatgttgatgtgggttctggccctatcgcggagattgtgcggcagattgatgtggagtgtgattcgcctggtgacgggtggacgaaggttactcctgttgccggtgattatgaggataatccgtcggcgttgttggctcggcgtgttgctggtttggctgcgggtgtgcgggatttgcaaaagttttaaaaaagctcaacggattggtgtttgttgtgggtattgtgtgcaagggttttgatggtgtgttgaccgagtatgattgggctcaaatgtctggtctgatgggtaatatgccgtccgtgaagggcccggacgattttcgtgtcggcacgacggttcagggtgccacagtgttgtgtgaggtcctgccggggcaggcttgggcgcacggtgtgatgtgcacgtcgaatagtgttgagacggtgacggggcggcttccgggcccgggtgagacccgctacgactatgttgttctgtcgcgggattgggagcagaacacagccaggttggagattgttcccggtgggcgtgcggagcgtgcccgtgacgtgttgcgtgccgagcctggcgtgttccatcagcaactgttggctactttggtgttgtcgtctaacgggttgcagcagcagctggatcggcgtgctatagcggcccgtgtggcgtttggcgagtctgccgcgtgtgaccctacccctgtggagggtgatcgtgtgatggttccttcgggggctgtgtgggctaaccatgcgggcgagtgggtgcagttgtctccgcgtatcgagacgggctcgaagtcgatcatgtttggcgggtcgaatgtgtatgcttacacgatcccgtttgagcggcggtttgctagcccgcctgttgtggtggcgtctatggggactgcggctgggggtacgacccagattgatgtgaaagcctacaatattactaataaggattttagtttggcgtttattacgaatgatggttcgaagccgtctggtgtgcctgcggtggctaattggattgctgtcggcgtgtaatgcgcggcctgcggatatgtgacgtgttgtggtggttgtagtggtagggggctgtagtgtcatggtttacacctacgctcgtggcctctctttgtaccgctatcgctactgttcttggttcgattcaggcggctacgtacaggtcgaagaagaggcttaggcagttgtctgcgcaggttgatgcgatggaagagtacacgtggaatattcgccatattgttcaccgctataacgcgaatttgccggagaatgttgagccggtgaagatgcctgatttgcccgagtttttgaaggatactgttgatggtggtggggggtgaattgtgagggagttggaggaggagaagcggcagcgccgctcgtttgagaaggcttccctgatactgttgtttttgtcgcttgtgctgttggcggtggttgctgggggtgctttgcggtacgggtcggtggcttctgagcgggattcagagcaggctaaagcccagtctaatggtacagcggccaggggtttagccagccgtgtgaagcaggtgtgtgcttcgggtggccaagagtcggtgcggcttcaccagtctggtttgtgtgtggatgctcagcgtgttgagcggagtgtgcagggtgttccgggtccggccggtgtgcggggcccgcaagggcggcaggggccggctggtgttgatggttcggctgggctggttggccctgtgggtcctcaggggtctcctggtttgaatggtgtggctggtccgcaagggttgcccggcagtgacggatcggatggccgtgacggtgtgaacggggctgacggtaaagatggtgtgcctggtagggatggtgttgatggggctgatggtcgggatggttcggctggtgagcgtggcgatcaggggccatcgggccctgccggcccgcaaggtgcacagggtgagcgtggccctgttgggcctcaggggccgcagggttctgccggtgcgaatggatccgatggtaaggatggccgttctgtggtgtctgtgtactgttccgggggccgcctgtttgtgaaatatagtgacggtgtggcgtccactatatcgggttcggtggcctgcgagagtgtgaaaccatcacctgtggttaccgtgtcatccccgcaagtgagagaggaagggtgttactgatgttggtagtgtttggtggtggtgtgtggtgaggtttattcctgcggcgcatcactcggctggttctaattctccggtgaatagggttgtgattcatgcgacgtgcccggatgtgggttttccgtccgcctcgcgtaagggtagggcggtgtccacggcaaactattttgcttccccatcatcggggggttcggcgcattatgtctgtgatattggggagacggtgcagtgcctgtccgagtctacgattggttggcatgccccaccgaatcctcatagtttgggtatagagatttgcgcggatgggggttcgcactcctcgttccgggtgccgggccatgcttacacgagggagcagtggcttgaccctcgggtgtggcccgcggtggagagggcggcggtgttgtgcaggcagttgtgtgacaagcatggtgttccgaaaaggaagcttagcgtatccgatttgaaggctggcaagaggggtgtgtgcgggcacactgatgtgacggatgcgtggcatcagtcggatcatgacgatccggggccatggtttccgtgggacaggtttatggccgtcgtctgcggcggcagtggagagagtggagagttgagtatggctgatatacaagtgttacatgatcagattaaacagttgtcggggcaggttgcccagtcggtgaaccgtttgcatcacgatgtgggtgtggttcaggttcagaatggtgatctggcgcgccgtgtggaggctttgtcgtgggtgaagaatccggtgacggggaagctgtggcgtactaaggatgccctgtggagtgtctggtattacgtgctggagtgtcgcagccgtcttgcccggcttgaggcggacgttagccggttgaaaaagtgatggtgatgtgtgatgggtaaacagttttggttgggcctgttggagcgtgccctgaaaacttttgttcaaacgtttgttgccgtgttgggggtgactgcgggtgtcacatatactgcggagtcgtttcgtggtttgccgtgggagtctgccctgattacggccggggttgctgcaatactgtcggttgctacctcgtttggtagcccgtcgtttgttgccggtaaaccgaaaactacgtctgttgtggatgctgggcttgttccaccggatgatcctggaatagtggagtctcacatggttgacgaaacggatcctggcatgatagagcctatcgacgatgccgatgctggaggctaagagcctcggcgtgcggccgagtcggaggttggcacggtagagtctactgttgcataagtgaatatgtgtgtgtgccccagcggtgctgccacgattgtgtggtggctgctgctggggcactctttttgtttatgcggtgcggttactgtgtgttgttgtggttggggtatcctgcactgtcgcagcaccacaggatttcgctgcactcgtctagcgtgtcctggtcgatgttgaggttgtcgaggctgacttcttgaacggtgaggttcacatcatcgagtgagatgggtatatggtactggttttcgacactgtcaacaatgttttgcagctggttcatgttggtgggctgttgttggatgattcggtgtaccgctgttttgagggcggtgtagagggtattggttgtggtatcgatcatcgtgttatgccattccttcgttatcgtctggcatgtagtatgtgctgtttgcgtagcctgttagggtgatgagtgtttggtctgcccactgtttcacggtttgccgggtgactccgagtctctgggcggctgtggcgtaggtttgatcgtagccgtatacttccctgaacgcggcgagcctggctagccgtttccgctgtttggatggctggcaggtgagggtgtagtcgtcgatggcgagctgtaggtcgatcatggtggcaatgttgttgccgtgatgctggggggcggttggtgggggtggcattcctggttcaacactgggtttccatggtccgccgttccagatccattgggcggcttggataatgtcggcggtggtgtaggttcggctcatgtgtcatcccctgaacaggttgtcaaggttgtctgggttgctggtgttggtggtgtcgaatcgtccgacgcagtggcagtagtcgtacatgagtttgataatgtgttggtggtcgccgaggtaggtgttgccgctgatactgtaggtggctgtgccgtctttagagatggtgtatttggcggtgatggtttcgggtgtttctgtgttggtgatgattgctgtggtggtggtgcctacggtttggaggatggtggtttgggttccgtcgtcgaggatggttttaaccatggtgtgtgttctcccttttaaatgctggtttggttgtcggctatggctgtgatttcttgtaccggtttgggtaggtctaggtgttgtatggttttgtttgctagtcgttgggctacacggtagcacatttgagtccactggttgccttgtagctggtggtattgttcccgcaccgcaatatatagtagagagtcttggtacaggtcgtctgggttgacagccgggtagcggcgggcaatattggtgcaggctttgtgtagctggtgttggtgggctggtgtggtccatccccaatcggctgtggttgctaggtctgctttggttggtcgtctactcatggcatctattctatcgggctatctggtagttgtttggtgttttgttgttgatagtgtagcacacgagtccggggttgccggtggcgcctgtctggtgccggtaccagactgattctccttccatggatgggcattggatgaaggtgcgttgtccttgctcggagatttctaggtggtgccggtggcctgccatcaggatgtgtgatgtggtgccgttgtggaattcttggccgcgccaccattcgtagtgtttgccggtgcgccattggtgtccgtgggcgtgcaggatttgtgtgcctgccacatcaacggtggtggtcatttcgtctcgttgggggaagtggaagtggaggttggggtattggttgttgagctggtaggcttctgcgatggcgcggcagcagtccacgtcgaaggagtcgtcgtaggtggtgacgcctttgccgaagcgtacggcttctccgtggttgccgggtatggatgtgatggtcacgtttttgcagtggtcgaattggtggatgagttgcatcatggccatgcgggtgagcctgatttgtcccgtcaagggtgtttgtgtgcgccaggcgttgttgcctccttgtgacacgtatccttcgatcatgtcgccgaggaaggcgatgtggactcgttgcggctgtcctgcttgctgccagtagtgttttgcggctgccagtgagcgcaggtagtcgtcggcgaagtgtgctgtttctcctccggggatgcctttgccgatttggaagtctcccgccccgatgacgaaggccgcagtgctgtagtcggtgtgggtgttgtcggctggttttgggggtgtccattcggctagtttatcgacgagttcgtcgaccggatacgggtctgttgcgggttggtggtcaataatttttgtatggatcggcctgtttctccgttcggtaaggtccattcggagatgcgtgtgcggcgcacggtaccgttggctagattgtcgtcgatggtgtcgatggcgttgtcgtggttggctagctgtgtgagtagccggtctatattgtctatcactgggtatcctcctcttcctcgtgtgtggtggtggcttgtttgcggcggtagtctttaatgacggtggcggagatggggtatctggcttcagtgagcatttgggctagctgtgtggcggggatggacctgtcggcgaggacgtctgcggctttgttgccgtagcgttggatgagggtttcagttttggttgccatgatgtcctaggggttgtgtggttggttgccatcctgtgcggcagtcgccgtcgtgtcctggtttgcgtgtgcaccatgttgtggtgccgtctgtgtggtggagtgttttgccgcacatgacttcttggagatgctgtggtagctgctccgggttgttatcgttttgtgtgtcgaagagtgttttttgtttggtgaaatgttcggagacggttccgttgtgtacgggtagtatccatgttttccattgttgttgtagtcgggtgttccagtggaattgtttggcggcgttttctgcctgttttatggttttgtagtagccgacgagtatgcgctggtgttgctggtcgggcgggttttggcctcgccagtatcgtgccgccacggcgtaccggttgctggctgtgaaggcgttccagcagtactcgacaatgtgtgctagtaccttgtcgggcatgtctcgtgcttggttttcgtcgagccactcgtcaacaatgatgttgcgtatagcttgtttgtctttgatggttggtttgaatgcgatgcttatgatagggtcggctgttcgtcttgcatgaactggttgaaggtgttgttcccggcgtgttgggcttgtgtgatttgctggtcggtccagtctggatgttgctgtttcagataataccagtggcacgcattgtaggtttcgttttgtagccgggtgagatggttttcggtgatgatttgtttccacatggcccatgacacgtcgagccggtcaagaatttcgagggctgggatgttgaactggtcgaggaacaggatttcgtgggtgtagtagtttttctcgtaggcgtcccatccgcttcggtgcctgttgggctggtttttggggtaggcttcccggcatactttgtgtaaacgcttggccatgtcgtcgggcagtttaatgtcggggttggcgcggatcatggatcgcatcccatcataggtggtgccccaggtgtgcatgatgtaggtggggtcttcgccatcagcccatttttctgcacagatggcgaggcggatacgcctcctggctgtttggctggtgttgcgccggttggggattgggcacgtgtcgaggggatccatgaggctttatatgcctttcttggtttgggttgtttgtctggttttattgtagcactgtgttgagggcttgtgtcaaccctgttttgccggcctgcaggtaggtgtctgtgacatctccgacagtgaggggcacgtggatggcttgggggagtgcggtttggagggtttgggccatctggtcgcctgctttgtcggggtcggaccagatgtagatatggtcgtagccttcgaagaatttggtccaaaagttttgccacgaggtggctcctggtatggcgacggctgaccatccgcattgttcgagaatcatggagtcgaattcgccttcgcaaatgtgcatgttggtttgcgggttggccatggcggccatgttgtagatggagcctgtgtctccggcgggggttaagtatttggggtggttgtgggttttgcagtcgtgttgtagtgagcagcggaaacgcatttttcgtatttcggctggctccccccagacggggtacatgtaggggatggtgatgcactggttgtagtcttcgtggcctggtatggggtcattgtcgatgtatccaaggtggtggagccgggctgtttcttcgctgatgcctcttgctgagagcaggtcgagtatgttttcgaggtgggtttcgtagagggctgaggctttctggattcggcggcgttccgcaatgttgtatgggcgtagcgtgtcgtacattcgggttttcttcttctagtcgttgttgtaactgagcgaggcctcctccgacaccgcatgtgtggcagtaccagactcctttatcaaggttgatgctcatggagggctggtggtcgtcgtggagtgggcagagaatatgctgctcgtttcgtgacggattgtagcgtatctggtagtggtcgaggaggcggcaggtgtcagaggtgtgggaggagttctgcgagggttgataccacataggcttcactccatggcttgttgcgctgtttcatcactacgaggccgatagtggactggttttctcggttgcggtgttgctcatagttgcgtgcttcggttgcggcttctttcacgaattgggcgaggtgctgctgccccgctttagcttcgatcacataggttttgttgccggttttgaggatcaggtcaccctcatcctctctgccgttcagatgaagccgttctatatcgtgtccagtgtctcgtagctggtgtaggagtctggtttcccactcggccccagctcgcctattcttggattgctgtgtagccattatagtcctttatgttctgctgtcattttccatggctgtttttctaccaatggtccgaagaatgtgtattcaggatatgccctgagccgctcatattcggtgccgtctgggttggatttgccggtgcgctgtttgaggacggcgatgcgtgcctcggctgggatcgatagcccgttgccgttgtcttcgccaccatagagtgatacgcctagtatgagctgtggtttctcagagaggccgtttttgatttccctacgagagggtgggtgctcgatgtcagttcctgttttgtcggttgcgtggtgggtgacgatgatggtggagcccgtgtccctgcctaatgctgtgatccattgcatggcttcctgctgtgcctggtagtcactttcgcagtcttgaatgtccatcaggttgtcgatgacgatgatgggtgggaaggtgttccacatttccatgtaggcttgcagttccatggtgatgtctgtccatgtgatgggtgactggaatgagaatgtgatgtgttgaccgtggtggatgctgtctcgatagtattctggcccgtagtcgtcgatgttttgttgtatctgtgtggtggtgtgttgggtgttgagtgagatgattcgtgtggaggcctcccagggtgtcatgtcccccgatatgtagagggcgggctggctgagcatcgctgtgatgaacattgctagcccggatttttggctgccggagcgccccgcaatcatcaccaaatcccctttgtggatgtgcatgtcgaggttacagtagagggggtctagctggggtatgcggggcagttcggcagcggtttgggaggctctctcgaaggatcgttggagagagagcatcgggaccttatctatctatcggttggatgtgtattggtggtcagatggagtcgatgtcgatatcagcatcagttgaggctgtggtgtcgtctagctggccgttatcgcgcttgtctacgtatttggcaaccttatcgtagatggcgtcgtctaatggtttgaggatgacggcgttgaacccgttttttgtgcgtacggtggctagtttgaaggcctgctcttctcccaggtaggtttcgagttcgcggatcatggagtgtggccggtcgttgttgccgcgtgctttctcaatgatagcgttggggatggtttctggggtgccgttgttgaggtcgtcgagggtgtggaagatggtgacatcagcgtagatgcggtcggcgacctgtccgccgtagccttcggtattgtgttctacgtcgtggattttgaaagcgatggcggtggcgtcctggtttctggaggggttgaagaaggtgctgttgctgttgttgtttcggtaggtggcgagtcccattattgtttcctttactgttttgttggttggtgtcggttttatcgggtgaggctgtttcgtttagtgcggaacacctcggacacgtcactgttactagtgatggtctttttgtactgttttagaaggtcggctagctgtgctttgcttgttgcattgttgattttgttgatgacgatggtgttttctttggatgcgattttgttgacgtagtctttggctgcctggttgtatcggtcttggaggatgattgatgcgctcgctactagtgttgctagatcccagtctttggacacatcatcgtttttgagtccgcctagcaggtcgatgatggcctgttttgtctgctctgctgtgtctcctcggatgaccgcccatggtgcagcatagtctccaccatatttgagtgtgatcgtaatgcgatcatcagtgctattggtgttatcggtcactggtgctccttgctttcttctgttggggctgtgatggtggtttctaccgggtacctgtaggcgtctttcccgttgacggcccagcaggcgtccttgacggggcatcctttacagagtgttgtgacgtggggtacgaagatgccttgactgattcctttcattgcttgactgtacatggatgatacatgccggtaggtgttgttgtcaagatcgtacagttcggtggccgttccctgcttggcggactgtttgtctgttttggttgatgcgggtgtccaaaacatgcctttcgtgacatggatgtcgtgttgggcgagcatgtaccggtaggtgtgcagctgcatactgtcggcgggtagacggccggttttgaggtcgaggatgaaggtttcgccggtgtcggtgtcggtgaaaacgcggtcaatatatccgactatttttgtgtcatcgttcaggatagtttctaccgggtattcgatgcccggctcgccgtcaataacagcgatagcatattctggatggttgcgcctccatgttttccagcggtccacaaaggtggggccgtaaaccatccaccaatggtagtcttttttgtgtgggccccctgtttcgcacatgtttttgcatattctgccggagggtttgatctcggtgccttcggagcggacaagggcgacttgggtgtcgaaaacattgttgaaggataggaggttgtcgggtatttcggaatattcggcggggttgtgcaggtggaggtcgtactgttcggggatgtggtgtatggcgcttccggctatggtggcataccaggtgtgataggtggctttgtatccgtgttggaggcgcgatttttctccgcattctgcccactgtgacagtgagctgtaggagatgtggcctgggtggtggatggtttttggatattgtgctagaggcattacttgtcgcctttgtgggtgttccatgggttgcgggtgtcttggccggcatcgtgttgctggtaggcgaggagtgcgaggcagtgccaggcagcatgggctagatggggtagccctgattcatcgtcgaggttgtgtccttgctgccatgataacaggtgccggtagagggcgtcaacactgtgacaccaggggtatcctccggtccagttgttgtcgccgtatttggtggcaccgtagcctgccacagagcctagatcgtgcaaggctgcggggtcgatgagggatagcctgcagagttttaattcttttcgggcaccggtgttggggtcggtgtacatgcgggttggctcatccatggggtgtgtgctccttaggtgtgggttactggttgttgtcgtgggctagtgctacggcgagaataatgatggcgagggtttcagcgatgatgatgggtgttgtgatcatttagtgtctcggggattgttggtgagggttgatgcacccaggagggtggcgagggcgcatgcggcgatgatggcgagggctgccttgtgtggggtgccggttgcgtacatccatgtgatgatggcgccttggatccaggcgaggctggtgaagaatgtttcgtaactgtgcaactcgatgttgttgggtgtgttcatgactgttcctggatgatggtgttgatggttttgtagatgttgtacaggtcggtttcgatggtttgtagctgtttgatttggtggccgaggttgatgtccgggttgagagtgttgatgcgggaggcgatatcggtggctgtgcgtagtgtgccgccggtgtggtgaatgatgtgtgccgtgtcggcgagtccggtggtgacagcgtagtgggagaggagagacatagcggggatgctccttggcgggttactgttgctggttgatgttgaggtcggtgacgtgcggtgagctttctgttccggtgatgaggcagtggacggtgacgggtagtttggatgctcccggctggcggacggtggcgccgtagacgatggagaaggtgtctttaccaataattttgtggagttggaggtcgatgtcggggttgccgttccatttgacgccttgcgtggcggcttgctgttcggctttgcggttgcaggtgtgtgctgccgtgatcatggtgagtccggtggcggtttcttcaccccttgtttgggcttgcttgtgggctttggcttgttcggcttgtagggagcgggtggcggctgcctgccgtgccgctttctcggctttgcgctgttgggcggtttcaggtgtccatgtggcgttggctgtggtggcttgcggcgcgggttgtgaggcgagtggcgggttgtcatcgggggctggcatgaatgaggctgcggcgatgatggcggctgtgatgcctgcgatggtgtagccttttttcttgttcatgactgttgtcccctttccggggtgttgttcgttgctgacatgattaatcatggtgtgggcggttcctcatgtcaaggctgcgctcaacgattgtgagcgtttggtgtgtggctaggggttctatcgggcacacagggttagcaggtggccaatattgatgcgggtcacgttccagtagagtatcgaggcttcaccgcccttgatcagcttcaactcgttgttgctgaataaggtgccatcagtcgcgattaatgtgttggggcgtagctagaggagttcat

SEQ ID NO: 60 - DNA, 10705 bp, Pahexavirus sp.
  source 1..10705: mol_type = genomic DNA
aaatcacacatgagcagtatgtgcgtttgtgtgtggagttgtagcgtgacggccatgacggttccgcagctatggcgggcaagttcgtgtcggattttcggaagcttaacggtgtcgatcctggtttgatcgtgtatgacgagtttgatgctgccgccgcgttggctaggtcgttttcgactatgaagatgatgaatagtgacccggatagggtgaaggatacgattgatgcgatggcggcgggtgttaatcgggctgtcatgaatgctggccgtgacacggttgagtggtctgcgggtgcgcagggtaggccgtggcgtcgggtgactgatggtgatccgtgtgctttttgtgccatgttggctacgaggtcggattatacgactaaggaaagggcactcacttccggtcatactcggcgtcataagcgtggtggtaagcgtccgtttggttcgaagtatcatgatcattgtggttgtacggtggttgaggttgttggtccttgggaaccaaatagggctgatgccgagtatcagcgggtttatgagaaggcccgtgagtgggttgatgatcatgggttgcagcagtcgtctggcaatattttgaaggctatgcgtactgttggcgacatgagatgataggttccggttgtgcaccgccggttatcggtgcacggggttgtctcccgcacgggggtcaacaatgttgtgttgttttccgcaaggagtgtagggttaggctatggccgatcagaatgttgaggaactgaatgttgacaatgatattgtggagtccggaaaggataacggcattgttgatacagtaaaagacgatggcgggcaggaggtagccgacaatcagttgaagaatgaaggcgagggtaaatcgccggggactgattggaaggctgaggctcgtaaatgggaatctcgtgctaaaagtaatttcgccgagttggagaagcttcgcgcctcggatagtgattcggggtctactattgatgagcttcgccgcaagaatgaggaactcgaagacaggatcaacgggtttgttcttgagggtgtgaagcgcgaggtggctgccgagtgtggcctgtctggtgatgcgatcgctttcttgtcgggtggcgatcgtgaagcactggtggagtctgctaaggctttgaagggtttgatcgaccatagtagtggtggcgcgggtgtgcgccgtcttgcggggagtgcccccgttgatgatgttaaacgacgtgagggtgtcgcgtttgtggatgctcttgtcaataattctaggagatgatttataatggctgacgattttctttctgcagggaagcttgagcttcctggttctatgatcggtgcggttcgtgaccgtgctatcgattctggtgttttggcgaagctgtcgccggagcagccgactattttcggcccggtgaagggtgccgtgtttagtggtgttcctcgcgctaagattgttggtgagggtgaggttaagccttccgcgtctgttgatgtttcggcgtttactgcgcagcctattaaggttgtgactcagcagcgtgtctcggacgagtttatgtgggctgatgctgattatcgtctgggtgttttgcaggatctgatttcgccggctctgggcgcttctattggtcgcgctgtggatctgattgctttccatggtgttgatccggctacgggtaagcctgccacggctgtgaaggtgtcgctggataagacgtcgaagacggttgatgccacggattccgctacggctgatcttgttaaggctgttggtttgattgctggtgctggtttgcaggttcctaacggtgttgctttggatccggcgttctcgtttgccctgtctactgaggtgtatccgaaggggtctccgcttgccggccagcctatgtatcctgccgccgggtttgccggtttggataattggcgcggcctgaatgttggtgcttcttcgactgtttctggcgccccggagatgtcgcctgcctctggtgttaaggctattgtgggtgatttctctcgtgttcattggggtttccagcgtaacttcccgatcgagcttatcgagtatggtgacccggatcagactgggcgtgacctgaagggccataatgaggttatggttcgtgccgaggctgtgctgtatgtggctatcgagtcgcttgattcgtttgctgtggtgaaggagaaggctgcaccgactcctcctactccgcctaagcctgagcctaatcctccggctggtaactgatataagataagcgaatgtgtactatgtgcagggggtggtgttgatgggtatcattttgaagcctgaggatattgagcctttcgctgatattcctagagagaagcttgaggcgatgattgccgatgtggaggctgtggctgtcagtgtcgccccctgtattgctaaaccggatttcaaatacaaggatgccgctaaggctattctgcgtagggctttgttgcgctggaatgataccggggtttctggtcaggtgcagtatgagatggcggggccgttctcccagactacacggtctaatacgcccacgaacctcctgtggccttccgagattgccgcgttgaagaagttgtgtgagggtgatggtggggctggtaaagcgttcactatcacaccgaccattcatggcggatatgcacactctgaggtgtgttctactgtgtggggtggcggctgctcgtgcgggtcgaatattaacggctacgctggccctttgtgggagatatgatatgaccagttttccttatggtgaaacggttgagatgattcaaccgactgttcgtgtcgatgatcttggcgacaaggttgaagactggtctaagcctgtcgagaccgtgtaccataatgtggccatctatgcttccgtttcgcaggaggatgaggcggcaggccgtgactcggattatgagcattggtcgatgcttttcaagtcccctgttgtgggcgctgattatcgttgccggtggcgtattcggggtgtggtgcgggaggctgacgggtctcctatggtgtggcatcaccccatgtctggctgggatgctggtacgcaggttaatgtgaagcgtaagaagggctgatgggtagtggctcaggatgttaatgtgaagctgaacttgccgggtattcgtgaggtgttgaagtcttctggggtgcagtcgatgttggctgagcgtggcgagcgggttaggcgtgcggcctcggcgaatgtgggcggtaacgcttttgatagggcccaataccgtaatggtttgtcgtcggaggtgcaggttcaccgtgtcgaggctgtcgaccgtataggcaacacatataagggtggtaaaaggattgagtcgaagcatggcacgctggagaggtcgattggggctgcgtcgtgatcgtctacgatgaccccaggaagtgggctaaacgtgtgttggcggatgatggctggctgtccggtataccgtgtgtggggacggttcctgacgatttcagcggtgacctgatttggcttgcgttggatggtggcccgcagttgcatgtgcgtgagcgtgtttttttgcgggtgaatgttttctcggatacgcctgatcgtgctatgagcctgtcgaggcgtgttgaggctgtcttggctgatggtgtggacggtgaccctgtggtgtattgtaaacgttctactggtcctgatttgctggttgatggtgcacgttttgatgtgtattcgctttttgagctgatatgtaggcctgcggggtctgaataagcttattgtttttgttttaatgtaattgtttgatatttaatgggggttacgatggctgcaacacgtaaagcgtctaatgttcgctctgctgttacgggtgacgtctatattggtaaagctcatgccggtgacactattgatggtgtgaagacggttcctgacggtcttaccgctttagggtatctgtctgatgacgggtttaagattaagcctgagcgtaaaacggatgatttgaaggcttggcagaatgcggatgttgttcgcactgtggctacggagtcgtctatcgagatttctttccagctgatcgagtctaagaaggaggttattgaactgttttggcagtcgaaggttactgccggatctgattcgggttcgttcgatatttctcctggtgctacgacgggtgttcatgccctgttgatggatattgttgatggggatcaggttatccgctactatttccctgaggttgagcttgttgatcgtgacgagattaagggcaagaatggcgaggtgtacgggtatggtgtgacgttgaaggcgtatcctgcccagattaataagaagggtgatgcggtgtctggtcgggggtggatgacggctttaaaagctgatactcctccggttccgccttctccgaagcctcagccggatcctaatcctccgtccgagaactgatacacgattttaggggattgttgatagatgagtgacactggtttcacgttgaagattggtgaccgtagctgggtgttggcggatgcggaggagacggctcaggctgttcctgcccgtgtttttcgccgtgccgctaagattgcccagtcgggggagtctgcggatttcgcccaggttgaggtgatgttttctatgttggaggctgccgccccggctgacgctgtggatgctctggaggggcttcctatggttcgtgttgccgagattttccgtgagtggatggaatacaagcctgatggtaagggtgcctcgctgggggaatagtttggctccacggcctgattgatgattatcgtggggccatcgaatacgattttcgcactaaatttggtgtttctgtttatagtgttggtggcccgcagatgtgctggggtgaggctgttcggctggctggcgtgttgtgtaccgatacgtcgagccagttggcggcccacctgaatggttggcagcgcccgtttgagtggtgcgagtggctgtgctggacatgctggatcattacaggtctgctaatagtgaggggcagccggagcctgtggcgaggccgacggatgagcgtagggcccggtttacgtctgggctggtggacgatattttggcgcgtgttcgtgccggtggcggggtgtctcgcgagattaatattatggggtgaatagtgtatgtctggtgagatcgcttccgcatatgtgtcgttgtatacgaagatgcctggtttgaaggcggatgttggtaaacagctttctggggtgatgcctgcggagggtcagcgttcgggtagtctttttgctaacggcatgaagttggctttgggtggcgccgcaatggtgggcgctattagtgttgctaagaagggcctcaagtctatctatgatgtgactattggtggcggtattgctagggcgatggctattgatgaggctcaggctaagttgactggtttgggtcatacgtcttctgatacgtcttcgattatgaattcggctattgaggctgtgactggtacgtcgtatgcgttgggtgatgcggcgtctacggctgcggcgttgtctgcttcgggtgtgaagtctggcgggcagatgacggatgtgttgaagactgtcgccgatgtgtcttatatttctggtaagtcgtttcaggatactggcgctatttttacgtctgtgatggctcgcggtaagttgcagggcgatgacatgctgcagcttacgatggcgggtgttcctgtgctgtctttgcttgccaggcagactggtaaaacgtctgctgaggtgtcgcagatggtgtcgaaggggcagattgattttgccacgtttgcggctgcgatgaagcttggtatgggtggtgctgcgcaggcgtctggtcagacgtttgagggcgctatgaagaatgttaagggcgccctgggttatcttggtgctacggctatggcgccgtttcttaacgggttgcggcagatttttgttgcgttgaatccggttatcaagtcggtgacggattctgtgaagccgatgtttgcgtcggtggatcagggtattcagcggatgatgccgtctattttggcgtggattaaccgtatgccgggcatgatcacgagaatgaatgcacagatgcgcgccaaggttgagcagttgaagggcgtttttgcgagaatgcatttgcctgtccctaaagtgaatttggctgccatgtttgctggcggcaccgcagtgtttggtattgttgccgcgggtgtggggaagcttgttgcggggtttgccccgttggcggtgtcgttgaagaatctgttgccgtcgtttggtgctttgaagggagccgctggcgggcttggtggcgtgtttcgcgctttgggtggccctgtcgggattgtgatcggcttgcttgctgccatgtttgctacgaacgcccagttccgtgccgcggtgatgcagcttgtggctgtggttggccaggcgttgggccagattatggctgctattcagcccctgtttggtttggttgcggggattgtggcccagttggcgccagtgttcggccagattattggtttggttgccggtttggctgcccagattgtgcctttgattagtatgcttgtcgctcggctggtgcctgtgatcacgcagattattggtgcggtgacacaggttgctgcaatgtagctgcctgcgttgatgccggttattcaggctgttgttgctgtgatacggcaggttgttggcgtgaacatgcagttggtgccggttttgatgcctgtgattcagcagattttgggtgcggtcatgtctgttctgccgcctatcatcggccttatccggtcgctgataccagtcatcatgtctgttatgcgtgtggtgatgcaggttgttggtgtcgtgctacaggtggtggcccgcattattccggttgtgatgccgattgtgacagctgtgatcgggtttgtggcacgtattcttggcgctattgtgtctgctgcagcccggattattgggactgtcacccgtgtcatttcatggattgtgaatcatctggtgtctggcgtgaggtctatgggcacggccatcttgaatggctggaatcatattagagcgtttacgtcagcgtttattaaaggtttcaagtcggttatttctgccggcgtgaacgcggttgtggggttttttgcccggctgggttcttctgttgcctcccatgtgaggtctggttttaacgcggcccgtagtgctgtttcttctgcgatgaatgctatccggagtgttgtgtcttcggtggcgtctgctgttggcgggtttttcggttcgatggcgtctagggttcggaatggtgctgtgcgcgggtttaatggtgcccggaatgcagcttctagtgctatgcatgctatggggtccgctgtgtctagtggtgtgcatggtgtgctgggttttttccggaatctgcccggcaatattaggggcgccttgggtaacatggggtctttgttggtgtctgctggccgtgatgtggtgtctggtttgggtaacggtattcggaatgctttgagtggcctgttggatacggtgcgtaatatgggttctcagattgcgggtgctgcgaagtctgctttgggtattcattctccgtctagggtgtttcgtgacgaggttggccggcaggttgttgccggtttggctgaggggatcaccgggaatgcgggtttggcgttggatgcgatgtcgggtgttgcttcgcagcttccggatgctgtggatgcccggtttggtgtgcgatcgtctgtgggctcgtttaccccgtatggcaggtatcagcgcatgaatgataagagtgttgtggtgaatgttaacgggcctacctatggggatcctaacgagtttgcgaagcggattgagcggcagcagcgtgacgcgttgaacgcgttggcttacgtgtgattgcggggtgttgtgcatgtttattcctaacccttctgatcgttctggtttgactataacgtggtctatggatccactgtttggtgaggcgcgggtgcttcatttgactgattatacggggtcgtcgccgatcatgttgttgaatgattcgttgcgcggtttgggtgttcccgaggtggagcatttttcccaaactcatgttggggtgcacgggtctgagtggcgcgggtttaatgtgaagcctcgcgaggtgacattaccggtgttggtgtcgggtgttgacccggatccggtgggcgggtttcgtgacggttttttgaaagcctatgacgcgttgtggtctgcgtttcctcctggcgaggagggggagttgtcggtgaagactcctgccggtgttgagcgtgtgctgcggtgtcggtttgatacggtggatgacacgtttacggttgatccggtgaatcgtggctatgcgcgttatgttcttcatttgacagcttatgacccgttttggtatggggatgagcaaaagtttcgttttagtaacgctaagttgcaggattggttgggtggcggccctgtaggtgggagaggtacagcgtttccggtggtgttgactcctggtgtgggttctggctgggataatttgtcgaataagggtgatgtgcctgcgtggcctgtgattcgtgttgagggcccgctggagtcgtggtctgtgcagattgatggtttgcgtgtgtcttcggattaccctgtcgaggagtttgattggatcactattgacacggatcctcgtaaacagtctgcattgttgaatgggtttgaggatgtgatggatcgtttgacagagtgggagtttgcccctatcccgcctggcggttctcggagtgtgaatattgagatggttggtttgggcgccattgttgtgtcggtgcagtacaggtttttgagggcttggtgaatagttgatggctggtcttgttccgcatgtaacattgtttacgccggattatcatcgtgtggcgcctatcaatttttttgagtcgttgaagttgtcgttgaagtggaatggtttatcgacgctggagttggtggtgtctggtgatcattccaggcttgacgggttgacgaagcctggtgcacggctggttgttgattatggtggcggccagattttttcggggcctatgcgtaaggtgcatggtgtgggtccttggcgttcttcgcgggtgactatcacgtgtgaggatgatattcacctgttgtggcgtatgctgatgtggcctgtgaattatcgtcctggcttggttggtatggagtggcgtgccgacagggattatgctcactattctggtgctgcggagtcggtggctaagcaggtgttgggggataatgcttggcgttttccgccttgtttgtttatgaacgatgatgagagtcgtggccgctatattaaggattttcaggcccggtttcacgtgtttgccgataagttgttgccggtgatgtcgtgggctcggatgactgtcacggtgaaccagtttgagaatgcgaagtttgatcagcgtggtttggtgtttgattgtgtgccggctgtgacccggaagcatgtgttgactgccgagtcgggttcgattgtgtcgtgggagtatgtgcgtgacgccccgaaggctacgtctgtggtggttggtggccgcggcgagggtaaggatcggctgttttgtgaggatgttgattcgatggccgaggatgattggtttgatcgtgtcgaggtgtttaaggacgcccgtaacaccgatgagaaggcgcctcttatcgatgaggctgagcgggtgttgtccgagtcgggggctacgtcggggtttaagattgagttggctgagtcggatgtgttgcggtttgggccaggccgcctgatgccgggcgatttgatctatgtggatgtgggatcggggcctatcgcggagatagtgcgacagattgatgttgagtgtgtatcgcctggggatgggtggacgaaggtgacaccggttgccggtgattatgaggataatccgtcggctttgctggctcgccgtgtggctggtttggctgccggtgtgcgggatttgaaaaaattctagaatgatgggggtttgttgtgggtattgtgtgtaaagggtttgatggtgtgttgaccgagtatgattgggctcaaatgtctggtctgatgggtaatatgccgtctgcgaaagggccggacgattttcgtgtcggcactactgttcagggtgccacggtgttgtgtgaggtcctgccggggcaggcttgggctcacggggtgatgtgcacgtcgaatagtgttgagacggtgacgggtcagcttccggggccgggggagactcgttatgattatgttgtcctgtctcgggattggcaggagaatacggccaagttggagattgttcctgggggccgtgcggagcgtgccagggatgtgttgcgtgccgagcctggcgtgtttcatcagcagctactggctactttggtgttgtcgtctaacgggttgcagcagcagcttgataggcgtgctatagcggctcgtgtggcggttggcgagtctgctgcgtgtgatcctaccccaatggagggtgaccgtgtgatggtgccttcgggggctgtgtgggctaaccatgctaacgagtggatgttgttgtcccccaggattgagacgggttctaagtcgatcatgtttggtggccctgctgtgtat

SEQ ID NO: 61 - DNA, 13766 bp, Pahexavirus sp.
  source 1..13766: mol_type = genomic DNA
tataagagacaggtcaacacaccatcaaaacccttgcatacaatacccacaacaaacccctaacaattagaatttttgcaaatcccgcacaccggcagccaaaccggcaacacgccgagccaacaacgccgacggattatcctcataatccccggcaacaggagtaaccttcgtccacccgtcaccaggcgaatcacactccacatcaatctgccgcacaatctccgcaatagggccagaacccacatcaacatagatcaaatccccaggcatcagcttgcccggcccaaaacgcaacacatccgactccgccaactcgatcttaaaccccgacgaagcctgcaactcccccaacacccgctcagcctcatcgaagagagacaccttctcagaatcagtgttacgggcatccttaaacacctcaacccgatcccaccaatccccctcggccatcgaatcaacaacctcacaaaacagccgatccgtgccctcaccgcggccaccaacaaccaccgaagtcgccttcggggcgtcacgcacatactcccacgacacaatcgaaccagactcggcagtcaacacatggctacgtgtcacagcaggcacacaatcaaacagcaaaccacgctgatcaaacttcgcattctcaaactggttcaccgtgacagtcatccgagcccacgacaacaccggcaacaacttatcagcaaacacgtgaaaccgcacctgaaaatccttaatatagcgtccacgacgctcatcatcggtcataaacaaaccgggcggaaaacgccaagcattatcccccaacacctgcttagccaccgactccgcagcaccagaatagtgggcataatccctgtcggcacgccactccatacccaccaaaccgggacgataattcacaggccacatcagcatacgccacaacaggcgaatatcatcctcacacgtgatagtcacccgcgaagaacgccaaggacccacaccatgtactttacgcaccggtccagaaaaaatctggccgccaccataatcaacaaccagacgtgcacccggcttcgtcaacgcatccaacctagaatgatccccagacaacaccaactccagtgtcgacaaaccattccacttcaacgacagtttcagcgactcaaaaaaattgataggcgccacacgacgataatccggcgtaaacaatgttacatgcggaacaagaccagccatcaactattcaccaagccctcaaaaaccggtactgcaccgacacaacaatagcacccaaaccaaccatctcaatattcacactccgagaaccgccaggcggaataggcgcaaactcccactctgtcaaacgatccatcacatcctcaaacccattcaacaacgcagactgtttacgaggatccgtgtcaatagtgatccaatcatactcctcgacaggccaatcagaagacacacgcaaaccatcaatctgaacagaccatgaatccaacgggccctcaacacgaatcacaggccacgcaggaacatcacccttattagacagattatcccaacccgaaccaacaccaggcgtcaacacaaccggaaaagccgtaaccttcccaccgacatggccgccacccaaccaatcctgcaacttatcattactgaaacgaaacttctgctcatccccataccaaaacgggtcataggctgtcaaatgaagcacataacgggcataacccctattcaccggatcaaccgtaaacgtgtcatccgccgaatcaaaccggcacttcaacacacgctcaacacccgccggggtccgcaccgacaactccccctcctcgccaggaggaaacgcagaccacaactgatcgtatgcttgcaggaaaccgtcactaaacccgccatccggatccgggccgacacccgacaccaacaccggcagcgtcacctcccggggcttcacattaaacccacgccactccgagccgtgcaccccaacatgggttcgagaaaaatgctccacctcaggcacacccaaaccgcgcaacgaatcattcaacaacatgaccggggacgcacccgtataatccgtcaaatgaagaacacgctccggattattaccaatcaacggaaacatcgtccaatccaccgtcaaaccggcacgatcagacgggttaggaataaacatgaaccacaccccgcaatcacacgtaagccaacgcgttcaacgcgtcactctgctgccgctcaatccgcttcgcaaactcgttaggatccccataggttggcccgttaacattcaccacaacactcttatcattcatgcgctgatacctgccatacggtgtaaacgagcccaccgacgatcgcacaccaaaccgggcatcaaccgcatcaggcaaccgaccagccacacccgacatagcatccaacgccaaacccgcattaccagtgatcccctcagccaaaccggcaacaacctgccggccaacctcgtcacgaaacacccgagacggggaatgaatacccagagcagacttcgcagcacccgcaatctgggaacccatattacgcacagtatccaacaggccactcaaagcattccggataccattacccataccagaaaccacttcacggcccgcagacaccaacagggaccccatattaccgagagcgcgcctaatattaccgggcagattccggaaaaaccctagcacaccatgcacaccattggaaacagcggaccccatagcatgcatagcagaagatgccgcactccgggcaccattaaacccccgcacagcaccactacgaaccctagacgccatcgaactgaaaaacccgccaacagcagacgccaccgaagacacaatactccggatagcattcatcgcagaagagacagcgccacgagccgcgttaaaaccagacctcacatgagaagcaaccgaagaaccaagccgggcaaaaaaccccacaaccgcgttcacaccgccagaaacaatcgacttgaaaccgttaataaacgcagacgtaaacgctctaatatgattccagccagcctgaataaccgaacccatacgcgccaaaccagacacaaaatgggccacaacccacccgataacacgggcaacagcagcaataacacgggcaacagccgacacgacagcaccaacaatacgggcaacaaacccgatcacagctgtcacaatcggcatcacaaccggaataatgcgggccaccacctgcagcacaaccgaaacaacctgcaccaccacacgcataatcgacatgatgactggtatcagcgaccggatcaggccgatgataggcggcagaacagacatgacagcacccaaaatctgttgaatcacaggcatcaaaacaggcaccaactgcatgatcacgccaacaacctgccgtatcacagcaacaacagcctgcaacaccggcatcaacgccggcaacaacattgcagcaacctgcgtcaccgcaccaataatctgtgtaatcacaggaaccagccgggcgacaagcatactaatcaaaggaacaatctgggcagccaaaccagcaaccaaaccaataatctgaccgaacaccggcgccaactgagccacaacaccagccaccaaaccaaacaggggctgaatagcgaccataatctgacccaaggcttgaccgacaacacccacaagctgcatcaccgcggcacgaaactgggcgttagtggcaaacatggcagcaaacaagccgatcacaataccaacagggccacccaaagcgcgaaacacgccaccaagcccgccagcggcacccttcaaagcaccaaacgacggcagtagattcttcaacgccaccgccagcggggcaaaccctgcaacaagcttccccacaccggcagcaacaataccaaacactgcggtgccgccagcaaacatggcacccaaattcactttagggacaggtaaatgcaacctcgcaaaaatgcccttcaactgctcaaccttggcgcgcatctgtgcattcattctcgtaatcatgccaggcatacgattaatccacgccaaaatagacggcatcatacgctgaataccagcatcgacggcagcaaacatcggcttcacagaatccgtgacagacttaataaccggattcaacgcaacaaaaatctgccgcaacccgttaagaaacggcgccatagctgtggcaccaagataacccagggcacccttaacattcttcatagcgccctcaaacgtcttaccagacgcttgcgcagcaccacccatgccaagcttcatcgcagccgcaaacgtggcaaaatcaatctgccccttcgacaccatctgcgacacctcagccgacgttttacccgtctgcctggcaagcaaagacagcacaggaacaccagccatcgtaagctgcaacatgtcatcgccctgcaacttaccgcgagccataaccgacgtaaaaatagcgcccgtatcctgaaacgacttacccgagatataagacacatcggcgacagtcttcaacacatccgtcatctgcccgccagacttcacaccagaagcagacaacgccgcagccgtagaagccgcatcccccaacgcatacgacgtaccagtcacagcctcaatagccgaattcataatcgaagacgtgtcagaagacgtgtgacccaaaccagtcaacttagcctgggcctcatcgatagccatcgccctagcaataccgccaccaatagtcacatcatagatagacttgagacccttcttagcaacattgatggcacccatcattgcggcgccacccaaagccaacttcatcccggaagcaaaaagactacccgaacgctgcccctcagcaggcatcaccccagaaagctgtttaccaacatcagccttcaaaccaggcatcttcgtatacaacgacacatatgcggaagcaatctcaccagacatacactattcaccccaacacatcaatctcgcgagacaccccgccactagcgcggacacgcgccaaaatatcgtccacctgcccagacgtaaacctcgccctgcgctcatccgtcggcctcgccacaggctccggctgcccctcactattagcagacctgtaatgatccagcatgtccaacaccgcccactcgcaccactcaaacggacgctgccagccattcacgtgggccgccaactggctagacgtatcgctacacaacacgccagccagccggacagcctcaccccaacacatctgcgggccaccaacactataaacagaaacaccaaacttggtgcggaaatcgtattcgatggccccacgataatcatcaatcaggccgtggagccaaactattcccccagcgaggcacccttaccttcaggcttatattccatccactcacggaaaatctcggccacacgaaccataggaagcccctccaaggcctccacagcatcctctggggcggcagcctccaacatagaaaacatcacctcaacctgagcgaaatccgcagactccccagactgggcaatcctggcggcacggcgaaaaacgcgggcaggaacagcctgcgccgtctcctccgcatccgccaacacccagctacggtcaccaatcttcaacgtgtaacctgtgtcactcatctatcaacaatcccttataatgcgtatcagttatcggacggcggattcggatccggctgcggcttcggcggaaccggaggagtatcagcttttaaagccgtcatccacccccgaccagacaccgcatcacccttatggttaatccgggcaggatacgccttcaacgtcacaccatacccgtacacctcgccattcttgcccttaatctcgtcacgatcaacaagctccgcctcagggaaatagtagcggataacccgatccccatcaacaatatccatcaacagggcatgaaccccggtggtggcaccaggagaaatatcaaacgaacccgaatcagatccggcagtaaccttcgactgccaaaacagctcgataacctccttcttcgactcgatcagctcgaaagaaatctcgatagacgactcagtagcaacagtgcgaaccacatccgcattctgccaagccttcaaatcatccgttttacgctcaggcttaatcttaaacccgtcatccgacagataccctaaagctgtaagcccggaaggaaccgcctccacacccttaatagtatcacccgcgtgcgcgtcaccaatatagacatcacccgtaacagcagagcgaacattagacgctttacgtgttgcagccatcataacccccaaaaacaatatcaaacaaaaaacaaacaacaatatcaaaacaaaacgtttactcggattcgacaggcctgcatatcagctcaaaaagcgaatacacatcaaaacgtgcaccatcaaccagcaaatcagggccagtagaccgtttacagtacaccaccgggccaccatcaaccccgtcaacaaggacagcctcaacgcgacgcgccaaagacatagcccgatccggcgtatcagaaaacacattcacccgcaaaaaaacctgctcacgcacatgcaactgcgggccaccatccaacgccaaccaaatcaggtcacccgtaaaatcatcgggcaccgtccccacacagggtatatcagacagccagccatcatccttgagcacgcgtttagcccacttcctggggtcatcgtagacgatcacgacgcagccccaatcgacctcgccaacgtgccatgcttagcctcaatccttttgcctcccttatatgtggtgccaatcctagccacagcctcaacacggtgaacctgcacctcagacgacaaccctgcacgatactgggccctatcaaaagcattaccgcccacattcgccgaggccgcacgcctcacacgctcgccacgctcagccaacatcgcctgcaccccagaagacttcaacacctcacgaatacccggcaagttcagcttcacattaacatcctgagccactacccatcagcccttcttacgcttcacattaacctgcgtaccagcatcccagccagacatggggtgatgccacatcataggagacccgtcagcctcccacacaacaccccttatacgccaacgacaccgataaccagcatccttgacaagctgcttaaaaagcagtgtccaatgctcatagtcagagtcacggcctgccgcctcatcctcctgtgacacagaagaatagatggccacattatggtacacggtttctacaggatgaccccaatcctcaaccctgtcaccaagatcatcgacacgaacagtcggctgaagcatcacaaccgtttcaccgaaaggaaaaccagccatccttatatctcccacaaagggccatcgcagccgttaatattcgacccgcacgaacagccctcaccccacacagtagaacacacatcggaatgagcatatccgccacggatcgtcggggtgatcgtgaacgctttaccagccccaccatcaccctcacacaacttcttcaacgcggcaatctcagaaggccacaacaaattcgtgggagtattagaccgtgtagtctgagcgaaaggacccgcagactcatactgcacctgacccgaaaccccggtatcattccagcgcaacaaagccctacgcagaatagccttagcggcatccttgtatttgaaatccggtttagcgatacagggggcgacactgacagccacagcctccacatcggcaatcatcgcctcaagcttctctcgaggaatatcggcgaaaggctcaatatcctcaggcttcaaaatgatacccatcaacaccaccccctgcacatagcatgaacattatcgcaacaaatagatcagttaccggccggaggattaggcttcggtgcagccttctccttcacgatagcaaacgaatccagagactcgatagccacatccaggacagcctcggcacgaaccataacctcgttatggcccttcaggtcacgcccagtctgatccgggtcaccatactcgataagctcgatcgggaagttacgctggaacccccaatgaacacgagagaaatcaccaacaatagccttaacaccagaggcaggcgacatctccggggcgccagaaacagtcgaagaagcaccaacattcaagccacgccaattatccaaaccggcaaacccggcggcaggatacataggctggccggcaagcggagaccccttcggatacacctcagtagacagcgcaaacgaaaacgccggatccaaagcaacaccgttaggaacctgcaaaccagccccagcaatcaggccgacagccttaacaagatcagccgtagcggaatccgtggcatcaaccgtcttcgacgtcttatccagcgacaccttgacagcagcagcaggcttacctgtagcaggatcaataccatggaaagcaatcagaccaaccgcgcgaccaatcgaggcacccagggccggggaaatcagatcctgaagcacacccagacggtaatcggcgtcagcccacataaactcgtccgagacacgctgctgagtcacaaccttgataggctgagcagtaaacgccgaaacatccaccgatgcggaaggcttaacctcgccctcaccaacaatcttagcgcgaggaacaccactaaacacggcacccttcacagggccaaaaatagtcggctgctccggcgaaagcttcgccaaaacaccagaatcgatagcacggtcacgaaccgcaccaatcatagaaccaggaagctcaagcttccctgcagaaagaaaatcatcagccatcacaaatcatctcctagaattattgacaagagcatcaacaaaagcgacaccctcacgtcgtttaacatcatccacggggcactccccgcaagacggcgcacacccgcaccgccactatggtcaatcaaacccttcaaagccttagcagactccaccaatgcttcacgatcgccaccgtgcaagaaagcgaccgcatcacccgacaggccacactcggcagccacctcacgcttcacaccctcaagaacaaacccattaatccggtcttcgagttcctcattcttgcggcgaagctcatcaatcacagaccccgcatcgccatccgaggcgcgaagcttctccaactcggcgaaattacttttagcacgagactcccacttacgagcctcagccttccaatcagtccccggcgatttaccctcgccttcattcttcaactgattgtcggctacctcctgcccgccatcgtcttttactgtatcaacaatgccgttatcctttccggactccacaatatcattgtcaactttcagttcctcaacattctgatcggccatagcctaaccctacactccttgcggaaaacaacacaacattgttgacccccgtgcgggagacaaccccgtgcaccgataaccggcggtgcacaaccggaacctatcatctcatgtcgccaacagtacgcatagccttcaaaatattaccagacgactgctgcaacccatgatcatcaacccactcacgggccttctcataaacccgctgatactcggcatcagccctatttggttcccaacgcccaacaacctcaaccaccgtacaaccacaatgatcatgatacttcgaacccagcggacgcttaccgccacgcttatgacgccgagtatgaccagtcgtgagcgccctttccttagtcgtataatccgacctcgtagccaacatggcacaaaaagcacacggatcaccatccgtcacccgacgccaagacctgccctgcgcacccgcagaccactccaacgtgtcacggccagcattcaacacggcacgattaaacccaaccgccatatcatcaatagtatcgtgggctttatccggatcacccttcaaaatcttcgtagtcgaaatcgaccgagccaacgccgcagcagcatcaaactcgtcattcacaatcaaaccaggatccacaccgttaagcctacgaaaatccgaaacaaaccgggcagccaacgacgccgacccatcatggccggcacgctccaactcgacacacaaacgcacatactgcgtgtcactcattttcccggaatgccacaaacgaccaagctcggcataatagccagcatacttcccggcaaacctgaccgcctcacgctgatactcagtcgcagccagcctcgacgcaacacccgaagccatccatcacacctcgttggtttgacgagaaatagccccagccaaagcaaccaacggatccgcagactcggcgcgatgacgcatcacagcctcaacctgcacatcatcaaggcccagcatctccaacaccgtccgagaatccgccggaagaataccgacacccacaagcttcgtcacagcatcagccgtagcagcccgagtcggcgtcgaagcatcacgccacctcaaacccacatcaccgaaaaacgcggcctcatcaacactcgaatcaagcgccctggcagcgaagaaaccaaccgacaaccagccctgaccaaacgacgtctgacgccgctcagcccgcttcacaagccgcgactcctcagcagccaaagcctcacccgaaggcggattagacgtaatgaacccgaaatagcgctccggaacagcagcctcacccgcagtcaactgagccaataagcgcatctgatccgaatacggagtaggagaattaaccggaaacgaccccacattcggagtgtcaccgtcatcatccttatccacagcccacacagaagccatcgacaggacccagccaggctgcgaaaactcgtcagccgacacgcccgtaacccacctttgcgggtaggcgtagaagtcacgattcacagactgcccaagcagcgtgcgcacagcctcatccgtgtaagccctaatagacctcgtaatctccgaacggccatcaatcctagaagtacggcgacgattcacaataggcaccaacggaaccgcaccaagaccattcacgatacggcccttctcaacccactcacgcgaaccccgccgctccacctgaacaatcacatcaggaagcaacaactccgcctcaacaacctcaggatcacacgtctgctgcaccacaaggccagcatccagacgagacccgtcagccgaaaacttgcccgtgcaattctttggtgactgcggacgaaccagtacagtaccatcatcctgggggataacagccacaaacgacaaaccaaaaatcagcgcatccaaatgcacatcacacgaagccgtagcaagccgattcgcagcatacacgcaatccaaaccgtagccgtcaccattcgtccagccaagccaatccagacgctcctccaaagcatccacagctataccaggccacgacaacacagtctgcacacgctgcaactccggaggaatggccacccccaaatcacgcacccgattcgaaccctcatagtagccctcaatacggcaatgccatgaagacaacctttgaatccgatcaaacatgccctcaatccaagccaactcatccgagttcataccacagacacccgcttcctaccaccacgatcacgacggccacgcctagcctgtttagcccccataaacgccagagacacagcctccaaaggaacctcagaaccatccttaaacgaggaaccccaaccccacgcagaacccttacgcttctgaacagccgacctcacagcaatatccaacatgtcacggcgagaatcagcacgagggtgagacacaacacccgaacgcacaccctccaaaaacgcctgacacgcctccacatacacgccagtatcagcaaccaccacaccacgccccggaacaccacgatccgtcaacgccttctgtaacaacaccgcacccgaaccggcaaccatgatccgagccgtgccaccccaacgaaccgccaaccaatcagccaaccggcccacaccatcaacaatcgtcaccgacagcccatcaatcacctcaacatgaaccccagcatcagtccgaccagcacccgccaacgcgacacgatcccccgaacgagaaaacgagacaccaaacaccttgccgccaaccaaaccagcctcatccaccgcagactgggaccacttatccgccggaatcacagacgcagcagactggccacgatcccaccagccaagccgctcccgagcaaacccggcagcagacatcgactcatgctcatcagacacagtcccaaaattcaggcgccgacccaacgcaggattcgtctcacccgcaagccgccgccacgacctcgccacatcatccggaaccgactcgtcaggaatcgaaaactccgtccacgcaatccgcttaccaccagacaaagcctgaccgcgaagacgcaacaccacagacccgtcagccaacggcccaggaggcgtacccaaaaaaatctgctgcggatcaccagacggggcagcgctcacggtaggaagcaacgcctccaactgctcatccgacaactcctgcgcctcatcacacaccaaatcatcaaccgtaaacccgcgagcagaaccacggcttcgagccacaaactccaccgaaccccaacccgggcaaccacacttacgctcaaacgtggcacaatccggatgatgcaacacaatagcctcctgaccattcgtcgcacgaatcgacttcaccatacgaaacaggtcaggaaactgccgctcattctcaaaaaacgacctcaaccgcataaacgccttacgagccgacttcaactcatgagcagtatgcaaaatacggcgaccctgaatagtcgccttaaacaactccacaacctccaaaatagcattcttgccattctgccgaggcacaaacgcaccacacacaccagacgcaagcctgccattaccaccgacagcaagccaatcatccaacccctgctgctgccacggatcaggcgtcagcccatactccctaccaagctccccagcatccccgcccgcagacaccgaatacgctgcagccacacgatgacgaggaacctgagaccccacaacctgagacacctaatcaggcccccttacgctccctataccgatcaatcatcgccacagccgacccgccgccacgcccaccagacgccacatccaccgaataccgatccaacatgcccataaacgccttcacatgcgcacgcaacgacgccaccatctccgcacgcccctcacgccacaccacatcatgaatcaccgcagcatccatgagaaacagccactccccatcagacacaaactgggcacgcgcatcctcaccccacacacgccaccaacgacgcgtctccccacaccaatcacgcccctcaggaagctcaggctgcaccaccaacaccaccaaacataaacagtaaaagtcgacaaaactataaaacaacaaaagggaggtatttcactaagccgtacgaggtcttgcactggtgtgcagggggtgtccccggtgggggttggcgggtttttcaccatggaatcaatgtttttgtggtttgttgttggaatttgatgtttggttcgctgcgattgcctttgcttctgttgcatgttctgcagatgatttgcccgttgtcgagggtgttgagtcctccccggctgacgggtgtgatgtggtcggcttcggggctggttggtagctggtgggtgtcccaggtgactgtctcttatacacatctccgagcccacgagacgatgagaaatg

SEQ ID NO: 62 - DNA, 10907 bp, Pahexavirus sp.
  source 1..10907: mol_type = genomic DNA
cagcccgtacacctcgccattcttgcccttaatctcgtcacgatcaacaagctccgcctcagggaaatagtagcggataacctgatccccatcaacaatatccatcaacagggcatgaaccccggtggtggcaccaggagaaatatcaaacgaacccgaatcggatccggcagtaaccttcgactgccaaaacagctcgataacctccttcttcgactcgatcagctcgaaagaaatctcgatagacgactcagtagcaacagtgcgaaccacatccgcattctgccaagccttcaaatcatccgttttacgctcaggcttaatcttaaacccatcatccgacagataccctaaagcagtcaacccatccggaaccgtcttcacaccatcaatagcgtcaccggcatgagctttaccaatatagacgtcacccgtaacagcagagcgaacattagacgctttacgtgttgcagccatcataacccccaaaaacaatcaaactaaaaatcaatcaacaaaaacaacgatacgcttactcggattcgacaggccgacacaccagctcaaaaagcgaatacacatcaaaacgtgcaccatccaccaaaagatcagggccagtagaccgtttacagtacaccacagggtcaccgtccacaccatccgcaaggacagcctcaacacgcctggctagcgacatagccctatccggagtatccgaaaacacgttcacccgcaaaaacacctgctcgcgcacatgcaactgcgggccaccatccaacgccaaccaaatcaaatcacccgtaaaatcgtcagacaccgtccccacacagggtatatcagacagccagccatcatcagccaacacacgtttagcccacacacgaggatcaccgtagacgatcacgacgcagccccaatcgacctcgccaacgtgccatgcttcgcctcaagccttttaccacccttatatgtggtgccaatcctagccacagcctcaacacggtgaacctgcacctcagacgacaaccctgcacgatactgggccctatcgaacgcgttaccgcctacattcgctgatgcggcacgccgcacctgctcgccacgctcagccaacatgccctgcacacccggcgcttttagcacctcacggataccaggaagattaagcttcgcatcaacatcacgtgccacaaccatcagcccttcttacgcttcacattcacctgcgtgccagcatcccagccagtcatcggatgatgccacatcataggagacccgtcagcctcccacacaacaccccttatacgccaacgacaccgataaccagcatccttgacaagctgcttaaaaagcagtgtccaatgctcatagtcagagtcacggcctgccgcctcatcctcctgtgacacagaagaatagatggccacattatggtacacggtttctacaggacgaccccaatcctcaaccctgtcaccaagatcatcgacacgaacagtcggctgaagcatcacaaccgtttcaccgaaaggaaaaccagccatccttatatctcccacaaagggccatcgcagccgttaatattcgacccgcacgaacagccctcaccccacacagtagaacacacatcggaatgagcatatccgccacggatcgtcggggtgatcgtgaacgctttaccagccccaccatcaccctcacacaacttcttcaacgcggcaatctcggaaggccacaggaggttcgtgggcgtattagaccgtgtagtctgggagaacggccccgccatctcatactgcacctgacccgacacgccggtatcattccagcgcagcaaagccctacgtaggatagccttagcagcatccctatatttgaaatccggtttagcgatacagggggcgacactgacagccacagcctccacatcggcgatcatcgcctcaagcttatctttaggaatatcggcgaaaggctcaatatcctcaggcctcaaaatgatacccatcaacaccaccccctgcacacagcatgaacattatcgcaacaaatagatcagttaccggccggaggattaggcttcggtgcagccttctccttcacgatagcaaacgaatccagagactcgatagccacatacaggacagcctcggcacgaaccataacctcgttatggcccttaagatcgcggccagtctgatccgggtcaccatactcgatcagttcgatcgggaagttacgctggaaaccccaatgaacacgagagaaatcaccaacaatagccttaacaccagaggcaggcgacatctccggggcgccagaaacagtcgaagaagcaccaacattcaggcagcgccaattatccaaaccggcaaacccggcagcaggatacataggctgaccggcaagcggagaccccttcggatacacctcagtcgacagagcaaacgagaacgccggatccaaagcaacaccgttaggaacctgcaaaccagcaccagcgataagaccgacagccttaacaagatcggtcgtagcagaatccgtggcatcaacaacatgcgtcgtcttatccagcgaagacttgacagccgcagcaggcttacccgtagccggatcaacaccatggaaagcaatcagatcaacagcgcgaccaatcgaagcaccaagagccggggaaatcagatcctgaagcacacccagacggtaatcagcatcagcccacataaactcgtccgagacacgctgctgagtcacaaccttaataggctgcgcagtaaacgccgaaacatcaacactagcggaaggcttaacctcaccctcaccaacaatcttggcgcgaggaacacccgaaaacacggcacccttcactgggccaaaaatagtcggctgctccggcgaaagcttcgccaaaacaccagaatcgatagcacggtcacgaaccgcaccaatcatagaaccaggaagctcaagcttccctgcagaaagaaaatcgtcagccatcagaaatcatctcctagaattattgacaagagcatcaacaaaagcgacaccctcacgtcgtttaacatcatccacgggggcactccccgcaagacggcgcacacccgcaccgccactatggtcaatcaaacccttcaaagccttagcagactccaccaaagcctcacgatcactaccgtgcaaaaaagctacagcatcagctgataggccacactcggcagacacatcacgcttcacaccctcaagaacaaactcgttaacacgaccctcgagttcctcattcttgcggcgaagatcatcaatcacagaccccgcatcaccatccgaggcacgaagcttctccaactcggcgaaattacttttagcacgagactcccacttacgagcctcagccttccaatccgtgccagacggcttatctacaccatcatgcttcgactgatcgcctgcctgcccgctttgatcatccttcacaacatcaacaatgtctccaccctttccgggctcaacaacatcattgtcgacattctgttcctcaacactctgatcggccatagcctaaccttacactccttgcggaaaacaacacaacattgttgacccccgtgcgggagacaaccacgtgcaccgataaccggcggcacacaaccggaaaccatcatctcatgtcgccaacagtacgcatagccctcaaaatattgccaggcgactgctgcaacccatgatcatcaacccactcacgagccttctcataaacccgctgatatgcggtgtccgcagaggagggctcccaacgccccacaacctcaaccaccgtacacccacaatgatcatgatacttcgaacccagcggacgcttaccgccacgcttatgacgccgagtatgaccagtcgtgagcgccctttccttagtcgtataatccgacctcgtagccaacatggcacaaaaagcacacggatcaccatccgtcacccgacgccaagacctgccctgcgcacccgcagaccactccaccgtgtcacggccagcattcaacacggcacgattaaacccaaccgccatatcatcaatagtatcgtgggctttatccggatcacccttcaaaatcttcgtagtcgaaatcgaccgagccaacgccgcagcagcatcgaactcgtcatacacaatcaaaccaggatccacaccgttaagcctacgaaaatccgaaacaaaccgggcagccaacgacgccgacccatcatggccggcacgctccaactccacacacaaacgcacatactgcgcatctgtcatcttcccggaatgccacaaacgaccaagctcggcataatagcccgcatacttcccggcaaaacgaatcgcctcgcgctgatacccggcagcagccagcctcgacgcaacacccgaagccgtccatcacacctcgttggtttgacgagaaatagccccagccaaagcaaccaacggatccgcagactcggcgcgatgacgcatcacagcctcaacctgcacatcatcaaggcccagcatctccaacaccgtccgagaatccgcaggcaaaataccggcaccaacaagcttcgtcacagcatccgctgtagcagccctcgtcggggttgaagcatcacgccacctcaaacccacatcaccgaaaaacgcggcctcatcaacactcgaatcaagcgccttagcagccaggaaaccaaccgacagccaaccctgaccaaacgacgtctgacgccgctcagcacgcttcacaagcctcgactcctcggcagccaacgcctcaccactaggtgggttagacgtgataaacccgaaatagcgttcaggcaccgcagcctccccagccgtcaactgcgccaacagccgcatctgatccgaatacggtgtaggagaattcacaggaaacgacccaacattcggggtatcaccgtcatcatccttatccacagcccacacagaagccatcgacaagacccagccaggctgcgaaaactcgtcagccgacacaccagtcacccaacgctgaggatacgcataaaaatcacgattcacagactgcccaagcagcgtacgaacagcctcatccgtataggcacgaatagaccgggtaatctccgaacgcccatcaatcctagaagtacggcgccgattcacaataggcaccaaaggcaccacgcccaaactattcacgatacggcccgtctcaacccactcgcgagacccacgccgctcaacctgaacaatcacatcaggaagcaacaactccgcctcaacaacctcagaatcacacgtctgctgcaccaccaaacccgcatccagacgagacccgtcagccgaaaaccggccagtacaattctttggtgactgcggacgaaccaacaccgacccatcaccctgggggataacagccacaaacgacaacccaaaaatcagcgcatccaaatgcacatcacacgaagccgtagcaagccgattcgcagcatacacaccatccaaaccgtagccgtcaccattagtccagccaagccaatccagacgctcctccaaagcatccacagcaataccaggccacgacaccaccgtctgcacacgctgcaactccggcggaatagccacccccaaatcacgcacccgattagagccctcatagtagccctcaatacggcaatgccacggagacaacctttgaatccgatcaaacatgccctcaatccaagccaactcatccgagttcataccacagacacccgcttcctaccaccacgatcacgacggccacgcctagcctgtttagcccccataaacgccaaagacacagcctccaaaggaacctcagaaccatccttaaacgaggaaccccaaccccacgcagaacccttacgcttctgaacagccgacctcacagcaatatccaacatgtcacggcgagaatcagcacgaggatgactgatcacacccgacctgacaccctccaaaaacgcctgacacgcctccacatacaccccagtatcggcaaccaccacgccacggcccggaacaccacgatccgtcaacgccttctgcaacaacaccgcaccagacccggcaaccatgatccgagccgtgccaccccaacgcaacgccaaccagtcagccaaccggcccacaccatcaacaatcgtccccgacagcccatcaataacctcaacatgaaccccagcatcagtccggccggcacccgccatagcaacccgatcccctgaacgagaaaacgagacaccaaacaccttgccaccagtaagctccacatcatcgacagccgactgggcccacttatccgcaggaaccaccgacacggcagactggccacgatcccaccagccaagacgttcccgagcaaaacccgccgcagacatcgactcatgctcatcagacacagtcccaaaattcaggcgccgacccaacgcaggattcgtctcacccgcaagccgccgccacgacctcgccacatcatccggaaccgactcgtcaggaatcgaaaactccgtccacgcaatccgcttaccaccagacaaagcctgcccgcgaagacgcaacaccaccgacccgtcagccaacggcccaggcggcgtgccaaggaaaatctgctgcgggtcaccagacggggcagcactcaccgtaggaagcaaagcctccaactgctcatccgacaactcctgagcctcatcacacaccaaatcatcaaccgtaaacccgcgagccgaaccacggctacgggccacaaactcaaccgaaccccaacccggacagccacacttacgctcaaacgtggcacaatccggatgatgcaacacaatagcctcctgaccattcgtcgcacgaatcgacttcaccatacgaaacaggtcaggaaactgccgctcattctcaaaaaacgacctcaaccgcataaacgccttacgagccgacttcaactcgtgagcagtatgcaaaatcctgcgaccctgaatagtcgccttaaacaactccacaactgccaaaatagcattcttgccattctggcgaggcacaaacaccccacacacacccgaagcaagacgaccccctgcacccaccgcaagccaatcatccaacacctgctgctgccacggatcaggcgtcaacccatacgcacgacccaactccccagcatcaccgccagcagacaccgaatacgccgcagccacccggtgacgaggaacctgagaacccacaacctgagacatcaagcaccccgacgcttcctataccggtcaatcatcgccaccgcagaacccccaccacggccaccagacgccacatcaaccgaataccgatccaacatgcccataaaagccttcacatgagcacgaagcgaagccaccaaatccgcgtgaccctcacgccacacacaatcatgaatcaccgcagcatccatgagaaacagccactcctcatcagacacaaactgggcacgcgcatcctcaccccacacacgccaccaacgacgcgtctccccacaccaatcacgcccctcaggaggctcaggctgcaccaccaacaccaccaaacataaacaggaaaagtcgacaaaactataaaacaacaaaagggaggtatttcactaagccgtacgaggtcttgcacgggtgtgcagggggtgtccccggtgggggttgtgggttttttcaccatggaatcaatgtttttgtggtttgttgttggaatttgatgtttggttcgctgcgattgcctttgcttctgttgcatgttctgcagatgatttgcccgttgtcgagggtgttgagtcctcccctgctgacgggtgtgatgtggtcggcttcggggcttgttggtagatcatgggtgttccaggtgatggttgctccgcagagtgggcattcggtttggccttgttgttgggcttgggtgatgagtcgttgccgccagcgccggtgtgaggcggatgcggtgcggttggtgtgtgccatcacgccccctatcgtctaccatgcctctatgggctctcattgctcctgtaacggcctagaagatgttgggggtatgaatactctaccagtgccctgctgatcgatcctaggccctgttttgttcgtttgagggggtgttctgtttgtggtggggtggttgttttctccactacccccacgggtgtgagaaagatcacatcgcccccagcggtgtcaaaagaagaaggacacggaagaaaaatgggggtgggcgtgtgtttgcgtttcaaggcttagcgcttggcgcctagcggtgtaggacacgggctcagcaggaacacccttaaagtttttaaagtcttctacatataatatgcactttaagtcttacccggtgttaagggtgttggcgtgacacgccgtacgccttcagccgaacacgctaagccgtaaaggggacacgggtgtgagagtgtggggagtgtgcaaccgggagcgtgcgaccggtggtacacgagacacacggtgaaaagtccatcagcgctgacggcaaaaggttcctcttctcccctgatgaagaaaagaagagaagagagaaagaaccaaagagagtagagaagtaaagaagttaaccccttagctcttctaaaacttttataacttataagctttaatacttatattatattattatacttataagctttaagacttataggttataatattaaagtttaagactgatggttaactttaagtacttaaggtctttaatgttttatagttactttaagtgtttaaagctttatggttattttaactctttaagtcttacacactgatgttaattttatatccttaagtgcttagcctttaaggttttatagttactttgagactttaaagcttttatagtaacttagatccttaagtacctaagactgatgccgagcccttgatgggctcggtgctaagctatcagcaccttagcgctaagcccttaggtcttaaagtgtttggtagactgatggtaagcgaggttgggaagtgcgtcagcactttccggccttgcgtccagctggctacctgtccagcctatcataccccacctgggatgagtcaaactggtggttttggctctataggcgggtttgaggggtgtaaacgggtgtttttggtagtaaaggtccaaaaattaaacctaaacttttccttaaattttcttagagtcttgtaacctttgagggtggttcaggctgaaacccctagtcagaacgggtttcactcccgaacagctgtcacactgtactcctgtgtcctttccgaacacgctaggcccattagtgctgagggtgttccctcaggctttcgagtactcgtcgctagggctcctcgtactctcaagccttccctgatggcgtgtacccttttcagtgctgtgcctgatcggctgagcctgagggggctgatgccgagcccttgaggggctcggtgctaagtccatcagtgctaagaccctaaggctgatgctcccccttctttcttttaccgtgtccttcttccccccttagcatcccacactgtccacatagtgtaggcttagctaaccaggataggggctgatgatctatgccgagatggttgatcgtatagcgtgctcctgtaggcgtctagaatcgatcagaattgcttgggggtatgaatacctagcccccaccctgtcaggcgctcctaggcgccatgtcacagctttaaacggtatttctgggctacacccttcacgccagattggcagagtggccttgagggtgcgcaccaggccaggaggatgtgataaatctcacacacctagatgatagatcttatatctaagctcggcaccttgactcgctagatcatctgtcacacccgacactccagcatgaaacgctcaaccggtttgagcgccaccttgactatggagtcgcagaccgcacactctagaaaccacaacaacccatacatcaccgaaaggggcacaccctcatggccaccacactcatcacctcatccatcacctccctctacgggcagacagaaatcgacccactcgacctcacccgcaagccgccgccacgacctcgccacatcatccggaaccgactcgtcaggaatcgaaaactccgtccacgcaatccgcttaccaccagacaaagcctgaccgcgaagacgcaacaccacagacccgtcagccaaaggccccggaggagtccccaaaaaaatctgctgaggatccccagaaggcgccgcagacacagtaggaagcaacgcctccacctgctcatccgacaacccctgagcctcatcacacaccaaatcatcaaccgtaaacccgcgagccgaaccacggctacgggccacaaactcaaccgaaccccaacccggacaaccacacttacgctcaaacgtggcacaatccggatgatgcaacacaatagcctcctgaccattcgtcgcacgaatcgacttcaccatacgaaacaggtcaggagactgccgctcattctcaaaaaacgacctcaaccgcataaacgccttacgagccgacttcaactcgtgagcagtatgcaaaatcctgcgaccctgaatagtcgccttaaacaactccacaatctccaaaatagcattcttgccattctggcgaggcacaaacaccccatacacacccgaagcaagacgaccccctgcacccaccgcaagccaatcatccaacacctgctgctgccactgatcaggcgtcagcccatactccctaccaagctccccagcatccccgcccgcagacaccgaatacgctgcagctacacgatgacgaggaacctgagaccctacaacctgagacacctaatcaggtcctcttacgctccctattccctgtctcttatacactt

SEQ ID NO: 63 - DNA, 15405 bp, Pahexavirus sp.
  source 1..15405: mol_type = genomic DNA
gcaccaacaaccagcatcaccacacgcataatcgacatgatgactggtatcagcgaccggataaggccgataatcggcggcagaacagacatgaccgcacccaaaatctgttgaatcaccggcatcaaaaccggcaccaactgcattatcacaccaataacctgccgtatcacagccaaaacagcctgcaataccggcataagcgcgggcagcagcatggccgcaacctgcgtcacagcaccaataatctgtgtaatcacaggaaccagccgggcgacaagcatactaatcaaaggaacaatctgggcagccaaaccagcaaccaaaccaataatctgatcgaacaccggcgccaactgagccacaacaccagccaccaaaccaaacaggggctgaatagcgaccataatctgacccaaggcttgaccgacaacacccacaagctgcataacagaggcacgaaactgggcgttcgtagcaaacatggcagcaaacaagccgatcacaataccaacagggccacccagggcgcgaaacaccccgccaagcccaccagcggcacccctcaaagcaccaaacgacggcaacaaattcttcaacgcaaccgccaacggggcaaaccctgcaacaagcttccccacacccgcagcaacaataccgaacaccgctgtgccacccgcaaacatggcacccaaattcactttagggacaggcaaatgcaacctagcaaaaacgctcttcagctgctccaccttggcgcgcatctgtgcattcattctcgtaatcatgcccggcatacgattaatccacgccaaaatagacggcatcatacgctgaataccagcatcgacggcagcaaacatcggcttcacagaatccgtgacagacttaataaccggattcaacgcaacaaaaatctgccgcaacccgttaagaaacggcgccatagccgtggcaccaggataacccagggcacccttaacattcttcatagcgccctcaaacgtcttaccagacgcctgcgcagcaccacccatgccaagcttcatcgcagccgcaaacgtggcaaaatcaatctgccccttcgacaccatctgcgacacctcagccgaggttttacccgtctgcctggcaagcaaagacagtacaggaacacccgccatcgtaagctgcaacatgtcatcgccctgcaacttaccgcgagccataaccgacgtaaaaatagcacccgtatcctgaaacgacttacccgagatataagacacatcggcgacagtcttcaacacatccgtcatctgcccgccagacttcacaccagaagcagacaacgccgcagccgtagaagccgcatcccccaacgcatacgacgtaccagtcacagcctcaatagccgaattcataatcgaagacgtgtcagaagacgtatgacccaaaccagtaagtttagcctgagcctcatcgatagccatcgccctagctataccgccaccaatagtcacatcataaatcgacttgaggcccttcttagcaacactaatagcgcccatcatcgccgcaccaccaagagccaacttcatgccgttagcaaacaggctacccgaacgctgaccctccgcaggcataaccccagaaagctgtttaccaacatcacttttaaggccaggcatcttcgtatacaacgacacatatgcggaagcaatctcaccagacatacactattcaccccataatattaatctcgcgagacaccccgccaccggcacgaacacgcgccaaaatatcgtccacctgcccagacgtaaaccgggccctacgctcatccgtaggcctcgccacaggctccggctgcccctcactattagcagacctgtaatgatccagcatgcccaacacagcccactcgcaccactcaaacgggcgctgccaaccattcaggtgggccgccaactggctagacgtatcggtacacaacacgccagccagccggacagcctcaccccaacacatctgcgggccaccaacactataaacagaaacaccaaacttggtgcggaaatcgtattcgatggccccacgataatcatcaatcaggccgtggagccagattattcccccagggaggccgctttctggtcaggcttgtattccatccactggcggaaaatctcagcaacacgaaccataggaagcccctccagggcctctaccgcatcagccggggcggcagcctccaacatagaaaacatgacctcaacctgggcgaaatccgcagactcccccgactgggcaatcttagctgcacgacggaaaacgcgggcaggaacagcctgagccgtctcctccgcatccgccaacacccagctacggtcaccaatctttaacgtgtaacctgtgtcactcatctatcaacaatcccctaaaatcgtgtatcagttctcagatggcggattcggatccggctgaggcttcggaggaggaggaggcgtcggaggagtatcagcttttaaagccgtcatccacccccgacccgacaccgcatcacccttatgattaatctgggcaggatacgccttcaacgtcacaccatacccgtacacttcgccattcttgcccttgatctcgtcacgatcaatcaactcaacctcagggaaatagtagcgaataacctgatcgccatcaataatatccatcaacagggcgtgaacacccgtcgtggcaccgggagaaatatcgaacgaacccgaatcggctccggcagtaaccttcgactgccaaaacagctcgataacctccttcttagactcgatcagctggaaagaaatctcgatagacgactcggtggcaacagtgcgaacaacatccgcattctgccacgccttcaaatcatccgttttacgctccggcttaatcttaaacccgtcatcagacagataccctaaagcagtcagcccgtcaggaaccgtcttcacaccatcaatagtgtccccggcatgagccttaccaatattgacgtcacccgtcacagcggaacgaacattagacgctgtacgtgttccagccatcttaacccccaaaaacaatatcaaacaaaaaacaaacaacaatatcaaaacaaaacgtttactcggattcgacaggcctgcataccagctcaaaaagcgaatacacatcaaaacgtgcaccatccaccaaaagatcagggccagtagaccgtcgacagtacaccaccggatcaccatcaaccccgtcagccagaacagcctcaacacgacgcgccaaagacatagcccgatcaggcgtatcagaaaacacattcacgcgcaaaaaaacacgctcacgcacatgcaactgcggtccaccatccaacgccaaccaaatcaggtcacccgtaaaatcatccggcaccgtccccacacagggtatatcagacagccagccatcatccttgagcacgcgtttagcccacttcctggggtcatcgtagacgatcacgacgcagccccaatcgaacgagccagcgtgccatgcttcgcctcaatacgcttcccacccttataggtggtaccaatcctggcgacagcctcaacacggtgaacctgaacctccgatgataaccctgcacgatactgggccttatcgaaagcgttaccgcccacattcgccgaggccgcacgcttgacacgctcaccacgctcagccaacatcgactgcaccccagaagacttcaacacctcacgaatacccggcaagttcagcttcacattcacatcctgagccactacccatcagcccttcttacgcttcacattgatctgcgtgcccgcatcccagccggacatcggatgatgccacaccataggagacccgtcagcctcccacacaacaccccggatacgccacctgcaacgataatcagcaccaacaacagactgcttgaaaagcatcgaccaatactcatagtcagagtcacgccccgcagcctcatcctcctgcgaaacggaagcatagatggccacgttatggtacacagtctcgacaggcttagaccagtcttccaccttgtcaccaagatcatcgacacgaacagtcggttgaagcatcacaaccgtttcaccataaggaaaactggtcatatcatatctcccacaaagggccagcgtagccgtcaatattcgacccgcacgagcaaccctcaccccacaccgtggaacacacctcagaatgattcacactactcctcatggtcggtgtaatagtgaacgctttaccagccccaccatcaccctcacacagcttcttcaacgcggcaatctcagaaggccacaacaaattcgtaggagtagtagaccgtgtagtctgagcgaaagggcccgcagactcatactgcgcctgacccgacacgccagtatcattccagcgcaacaaagccctgcgcagaatagccttagcggcatccttgtatttgaaatccggtttagcgatacagggggcgacactgatagccacagcctccacatcggcgatcatcgcctcaagcttatctttaggaatatcggcgaaaggctcaatatcctcaggcttcaaaatgatacccatcaacaccaccccctgcacatatacatatcaccgctacaataaatcagttcccggccggcggattaggcttcggggcagccttctccttcacaacagcaaacgaatcaagcgactcgatggccacatacagcacagcctcggcacgaaccataacctcattatggcccttcagatcacgcccagtctgatccggatcgccatatttgatcagctcgatcgggaagttacgctggaaaccccaatggacacgagagaaatcaccaacaatagccttcaccccagaagcaggcgacatctccggggcacccgaaacagtcgaagtagaaccaacattcaagccgcgccaattatccaaaccggcaaaaccggcggcaggatacatcggctgaccggcaagcggagaccccttcggatatacctcggtagacagtgcaaacgagaacgcaggatccaaggcgacaccgttaggaacctgcaaaccagcccccgcaatcaggccgacagccttaacaagatcggtcgtagcagaatccgtggcatcaaccgtcttcgtcgtcttatcaagcgacaccttgacagcagcagcaggcttacccgtagccggatcaacaccatggaaagcaatcagatccacggcgcgaccaatcgaagcaccaagagccggagaaatcagatcctggagcacacccagacggtaatcagcatcagcccacataaactcgtcgctcacgcgctgctgggtaacaaccttgatcggctgggcagtaaacgccgaaacatccaccgatgcggaaggcttaacctcgccctcgccaacaatcttagcgcgaggaacaccactaaacacggcacccttaacaggcccgaaaatcgtcggctgctccggcgacagcttagcaagcacaccagaatcgatagcacggtcacgcaccgcaccaatcatagaaccagggagctcaagcttccctgcagaaagaaaatcgtcagccatcacaaatcatctcctagaattattgacaagagcatccacaaacgcgacaccctcacgtcgtttaacatcatcaacgggggcactccccgcaagacggcgcacacccgcgccaccactactatggtcgatcaaacccttcaaagctttcgcagactcggcaagcgactccttatcgccacccgacatgaaagcgatcgcatcactggacaaaccatactctgaagccacctcgcgcttcacaccctcaagaacaaacccgttgatcctgtcttcgagttcctcattcttgcggcgaagctcatcaatcatagatccagaatcgtcactcgatgtacgaagcttctccaactcggcgaaattacttttagcacgagactcccatttgcgagcctccgccttccaatcagtcccagacggcttatcaccgccttcattcttcaactgattgtcggctacctcctacccgccatcgtcttttatcgtatcaacaatgccgttatcctttccggactccacaacatcattgtcaacattctgttcctcaacactctgatcggccatagcctaaccctacactccttgcggaaaacaataccattcttgccgccccccgtgcgggagacaacccgtacaccgataaccggcgatgcacaaccggaaaccattcatcgcatatcgccaacagtacgcatagccttcaaaatattaccaggcgactgctgcaacccgtgatcatcaacccactcccgggccttctcataaacccgctgatactgggtgtccgcagcattgggctcccaacgcccaacaacctcaaccaccgtacaaccacaatgatcatgatacttcgaacccagcggacgcttaccgccacgcttatgacgccgagtatgaccagtcgtgagcgccctttccttagtcgtataatccgacctcgtagccaacatggcacaaaaagcacacggatcaccatccgtcacccgacgccaagacctgccctgcgcacccgcagaccactccaccgtgtcacggccagcattcaacacggcacgattaaacccaaccgccatatcatcaatagtatcgtgggctttatccggatcacccttcaaaatcttcgtagtcgaaatcgaccgagccaacgccgcagcagcatcaaactcgtcatacacaatcaaaccaggatccacaccattcaaccggcgaaaatccgacacaaacctggcagccaacgatgccgaaccatcatggccggcacgctccaactccacacacaaacgcacatactgcgtgtcactcatcctgccggcacgccacaaacgaccaagctcacaataatagcccgcatacttcccagcaaacctgaccgcctcacgctgatactcagtcgcagcaagcctcgcctcaacccccgaagccatcgcctatcatacctcgttagtttgacgcgatatagccccagccagtgccgccaacgggtcagacgactcagcacgatgacgcatcacagcctcaacctgcacatcatcaagccccaacatctccaacaccgtacgagaatcagcaggcaaaataccggccccaacaagcttcgtcacagcatcagccgtagccgcccgagtcggggttgaagcatcacgccaacgcaaaccaacatcaccaaaaaaatcggcctcatcaacacgagaatccaacgccttggcagccaaaaaaccaaccgacagccagccctgaccaaacgacgtttgacgccgctcagcacgcttcacaagccgagattcctcggcagccaaagcctccccactaggtgggttagacgtgataaacccgaaatagcgttccggaacagccgcctcacccgcagtcaactgcgccaacagccgcatctgatccgaatacggtgtaggcgaattcacaggaaacgaccccacattcggggtatcaccatcatcatccttatccacagcccacacagaagccatcgacaggacccagccaggctgcgaaaactcatccgcactcacgccagtcacccaacgctgaggatacgcataaaaatcacgattcacagactgccccaacagtgtgcgcacagcctcatcagtgtaagccctaatagacctcgtaatctccgaacggccatcaatcctagaagtacggcgacgattcacaatcggcaccaacggaaccgccccaagactattcacgatacggcccgtctcaacccattcacgcgacccccgccgctccacctgaacaatcacatcaggcaacaaaagctcagcctcaacaacctcaggatcacacgtctgctgcaccacaaggccagcatccaaacgagacccatctgcagaaaacttgcccgtacaattctttggtgactgcggacgaacagaaacagtgccatcaccgccaggaatgatagcctcaaacgacaacccaaaaatcagcgcatccaaatgcacatcacacgaagtcgtagcaagccgattcgcagcatacacaccatccaggccgtagccgtcaccattagtccagccaagccaatccagacgctcctccaaagcatccacagctataccaggccacgacaccacagtctgcacacgctgcaactccggaggaatagccacccccaaatcacgcacccgattagagccctcatagtagcccccaatacgacaatgccacgaagacaacctttggatacgatcaaacatgccctcaatcagagccaactcatccgagttcataccacagacacccgcttcctaccagaccgttcacgccgcttcacattaactgttttcgcaccaagatacgccagcgacacagcctccaaaggaacctcagaaccatccttaaacgtcgagccccagccccaagccgaacccttacgcttctgaaccgccgacctcacagcaatatccaacatgtcacggcgagaatcagccctagggtgagaaaccacaccagaccttacaccttccaagaaggcttgacacgcctccacataagtgccagtatcagcaacaatcacgccacggcccggaacaccacgatccgtcaacgccttctgcaacaacaccgcaccagacccggcaaccatgacccggtcagtatcaccccaacgaaccgccaaccagtcagccaaccggcccacaccatccacaatcgtccccgacaggccatcaataacctcaacatgaacaccagcatcagtcctgccagcaccagccaaagcaaccctattcccagaccgcgaaaacgaaaccccaaacaccttcccaccagcaagctcaacatcatcaaccgcagactgagcccacttatcggccggtatcacagacgcggcagaccgtccacgatcccaccagccaagccgctcacgagcaaacccggcagcagacatagactcatgctcatccgagactgtcccaaaattcaggcggcgacccaaggctggattagtattcccagccaatttccgccattgtcgagctaaatcgtccgggttagactcgtcaggaatcgaaaactccgtccacgcaatccgcttaccaccaccaagcgcttgcccccgaagacgcaacaccaccgaaccatcagccaacgggccaggaggagtaccaaggaaaatctgctgaggatcaccagacggggcagcagacaccgtaggaagcaaagcctccaactgctcatccgacaactcctgagcctcatcacacaccaaatcatcaaccgtaaacccgcgagccgaaccacgagaacgggccacaaactccaccgaaccccaacccggacagccacacttcttaccacccacacgacaatcaggatgatgcaacacaatcgactcctgaccattcgtcgcacgaacagccttcaccatacgagccaaatccggatagcggcgctcattctcaaaaaacgaccgcaaacgcataaacgccttacgagccgacttcaactcgtgagccgtatgcaaaacacgccgcccctgaaccaccatcttaaaaagctcaacaacctcaaggatcgcgttcttcccattctggcgaggcgcaaacaccccacacacacccgcagcaagcctgccattaccacccacagcaagccaatcatccaacacctgctgctgccacggatccggagtcaacccatacgcagcccccaaagcaccagcatccttgccagcagacaccgaatacgccgcagccacacggtgacgaggaacctgagacccaacaacaccagacacctaatcaggcccccttgcgcttcctataccggtcaatcatcgccaccgcagaacccccaccacggccaccagacgccacatcaaccgaataccgatccaacatggccataaacgccttcacatgagcacgaagcgaagcaacaaaatccgcgcgaccctcactccacaccacatcatgaatcacagccgcatcaagaagaaacaaccactcctcatcagacacgtactgagcgcgcggatcctcaccccacacaccccaccaacgacgcgtctccccacaccaatcacgactatcaggaagctcaggctgcacaacactcaccaccaacacaaaaagtcgacaaacagacaaaaccacacaagagaggtattccactaagccgtacgaggtcttgcacgggtgtgcagggggtgtccccggtggttgttggctggtttttcaccatggattcaatgtttttgtggtttgttgttggagtttgatgtttggttcgcttcgattgcctttgcttctgttgcatgttctgcagatgatttgcccgttgtcgagggtgttgattcctccccggctgacgggtgtgatgtggtcggcttcggggctggttggtaggtcgtgtgtgccccaggctatctgggctccgcagagtgggcattcggtttggccttgctgtcgggcttgggtgatgagtcgcgctcgccagcgccgatgggcttggctggctgtgcggttggtgcgtgccatcacgtcccccgatctcctatggcctctgtgagcctctcattgctcctgtaacggcttgggaaccgctgggggtatgaataccctaccgatgccctgccgttcgattctaggccctgttttgtgcgtttgagggggcgtcctgttgattccggggtgtttgttttcccaactacccccatgggtgtgagaaagatcacatcgccccccagcggtgtcaaaagaagaaggacacggtaaaagaaagaggggggtggatgggtgttcgcgtttcacagcttagcgcttagcgcctagcggtgtagaacacaggctaagcgggaacaccttcaaagtttttaaagtcttctacatataatatacactttaagtctcacctagtgttaagggtgttagcgtgacacgccgtacgccttcagccgaacacgctaagcctgaaagggatacgggtgtaagagtgtggggagtgtgcgatgggagcttgcgaccagaagcacacgagacacacggtgaaaagtctgtcagcgttgacggtaaaggttcctcttctcccctgatgaagaaaagaagagaagagagagagaaccaaagagagtagagaagtaaagaagttaaccccttagctcttctaaaacttttataacctataagctttaagacttataggttataatattaaagtttaagactgatggttaactttaagtacttaaggtctttaaagtcttatagttactttaagtgtttaaagctttatggttattttaactctttaagtcttaaacactgatgttaagtttatatccttaagtgctaagcctttaaggttttatagttactttaagactttaaaacttttatagtaacttagatccttaagtacctaagactgatgccgagcccttgagggggctcggtgttaagtgtgtaagcctttaaggttattaattaactttaagtgctaagtctttaaggttttatatgtactttaagtgtttaaggctttaagactgatgccgagcccttgagggggctcggtgttaagctatcagcaccttagcgctaagcccttaggtctttaagtctttggtagactgatggatgtaagggtgaaagccgcgtcagcggatttcggccttgcgtccagctggctacctgtccagcctatcataccccacctggggtgagtcaaactggtggatttggctctataggcgggtttgaggggtgtaaacgggtgtttttggtagtaaaggtccaaaaattaaacctaaactttttcttaaattttcttagagtcttgtaacctttacaggtggttaaggctgaaacccctagtcagaacgggtttcactcccgggccgctgtcacactttactcttgtgtcctttccgaacacgctaggcccatcagtgctgagggtgttcccttaggcttgagagtactcatcgctagggctcctcgtactctcaagccttcccagatggcgtgtacccctttcagggctgtgtcttaagggctaagctcttaggacttgtgccgagcccttgagggggtacacgccatgctaggcgagtgtgatacatctcacacacctagatgatggatcttgtgtatcagcttgacaccttgactcgctagatcatctgccacacccgctatcacccagacatacccctgagacgccctagaagggccctagaatcgatcaacagggccaaccctatataatcctacccccagaagatttgagacactgagagaggcaataaaggcctcagtaacatctgtcacacccgacactccagcatgaaacgctcaatccgaatgagtgcagccttgactgtggggtcgcagctcgcacactctagaaaccacaacaacccctacatcaccgaaaggagcacacccatggatggcacactcatcacaccatcattcaccagcctctacaggcagacagaaatcgaccccctcagcctccacagcctcaccggaaaccacagcgaggacattgatctcgacatggtgcgccgcatgtaccacgccaaagtacaagaagccatacgactcatccgacccgactggactgtcaccctcgacggcgccctatacgggccacccgactggcgccacctatccgagaatgaggccgaggaactccatgatctcatcgacatgatcgacgtagacgccatccttgtcgcatccacccactaaaccatcaacaacgttatcagcaacaaaaaggacatcatcatgcagaagatcgctgaccacttcactcagctctacacccccgccagctacgcctgccccacacccttcgacctgacacgcctccaaaacattgacagcaacctgctcgacttcgagggcctcgccgaagcctaccggcaatgcgtagaagccgaactccacaagctacgcccccacaccttcatcgcatccgacggcaccgtgttcagccatgacgcgtggaagccactcaccagtggagaagccacgcaactctactggggtgtgacccgcatcaacgtaggccacctactcaccctgtgtgcccgataaaacccctagccacataccaaacgctcacaatcgttgagcgcagccttgacatggggaaccgcccacaccatgattaatcatgtcagcaacgaacaacaccccagaaaggggacaacagtcatgaacaagaaaaacggctacaccatcgccggaatcacagccgccatcatcgccgcagcatccttcatgccagccccagacgacaatccgccactcgcatcacagcccgcaccgcaagccaccacagccaacaccacatggacacctgataccgcccagcagcgcaaagctgagaaagcggcacggcaggcagccgccactcgctccctacaagccgaacaagccaaaacccacaagcaagcccaagcaaggggtgaagaaacatccaccggactcaccatgatcaccgcagcacacacctgcaaccgcaaagccgaacaacaggccgccgcacacggtgtcaactggaacggcaaccccgacatcgacctccaactccacaaaaccatcggtaaagacacattcagcatcgtctacggcgcaaccgcgaaacagcccggcgcatccaaactacccgtcaccgtccactgcctcgtcaccggaacagaagaccaccagcacgtcaccgacctcaacatcaacccgcaacagtaacccgccaaggagcaccccccagctatgcctctcctctcccactacgctgtcaccaccggactcgccgacacggcacacatcattcaccacaccggcggcacgctccgcacagccaccgacatcgcctcccgcatcaacaccctcaacccagacattgatctcgaccacgaaatccaccaactgttatctatcgaaaccgacctgtacaacatttataaaaccatcaacaccattcttcaggagcaagcatgaacacacccaacagtatcgagctacacagctacgaaacgttcttcaccagcctcgcctggatccaaggcggcatcatcacatggatgtacgcaaccggcaccccacacaaggcagccctcgccattattgccgcatgcgccctcgccaccctcctgggtgcatcaacactcacatacaagcccaaagacagcaaatgatcacaacacccatactgatcgctgaaaccctcgccataattattctcgccgtagcactagcccacgacaacaaccagtaacccacacttaaggagcacacaccccatggatgagccaacccgcatgtacaccgaccccaacaccggtgcccgaaaagaattaaaactctgcaggctatccctcatcgaccccgcagccttgcacgatctaggctctgtggcaggctacggtgccaccaaatacggcgacaacaactggaccggaggatacccgtggagcctcagtgtcgacgccctctataggcatctactatcatggcagcaaggcaacaacctcgaccgcgaatccgggctaccgcatctagcccatactgcctggcactgcctcgcactcctcgcataccagcaacaccacgccggccaagacacccgcaacccatggaacaaaagcgacaaataatgcctctagcacaatacccgaaaaccatccaccatccaggccacatctcctacagttcactctctcagtgggccgaacgtggtgaaaaatggcgcctatcccacggctaccatgcacagcaccacacctggtatgccaccatcgccggaagcgccatacaccacatcaccgaacaatacgacctacacctgtacaatcccgccgaataccctgcactaccagacaaactcgcatccttcaaaaacattttcgacacccaagtcgccctcgccgaatccgaaggcacagaaattaaaccctccggcagaatatgcaaaaacatgtgcgagtcgggcgggccacacaagaaagactacgactggtggatggtttacggccccacctttgtggaccgctggaaaacatggaggcgcaaccacccaggatacatcaccgcaatcctggacggtaaaccaggcatcgaatacccggtagaaaccatcctcgacgatgatacaaaaatagtcggctacatcgaccgcgttttcaccgacaccgacaccggcgaaacattcatcctcgacctcaaaaccggatgtctactcgccgacagtatgctgctgcacacctaccggtacatgctcgcccaacacggcatccatgtctcgaaaggcatgttttggacgcctgccaccagcctcaacga

SEQ ID NO: 64 - DNA, 13637 bp, Pahexavirus sp.
  source 1..13637: mol_type = genomic DNA
gtcttgcacgggtgtgcagggggtgtccccgtcgggggttggcgggtttttcaccatgaaacaaggttttttgtggtttgttgttggaaactaatgtttggttcgctgcgattgcctttgcttctgttgcatgttctgcagatgatttgcccgttgtcgagggtgttgagtcctccccggctgacgggtgtgatgtggtcggcttcggggctggttggcaggtcatgtgtgtcccaggtgatggttgctccgcagagtgggcattcggtttggccttgcttgcgtgcttgggtgatgagtcttgcccgccagcgtcggtgggcttggctggctgtgcggttggtgcgtgccatgatgtgtctgttcctcgcctagccctgtactggtcttatttgcccctctaacggcctggaatcgtctgggggtatgaataccctaccgatgccctgctgatcgattctgggggctgttttgttcgtttgagggggtgttctgtttgtgtcggggtggttgttttttccactaccccccggtgtgtgaaaaagatcacatcgccccccagctgtgtcaaaagagaaggacacgaaagaaaaatgggggtgggtgtgtgttcgcgtttcaagacttagcgcttagcgcctagcggtgtagaacacaggctaagcgggaacaccttcaaagtttttaaagtcttctacatataatatacactttaagtcttacctagtgttaagggtgttagcgtgacacgccgtacgcctgaggtgaaacacgccaagcctgaaatggacacaggtagagtgagtgtggggagtgtgcgatgggagcgtgcgaccagaagcacacgagtcacacggtgaaaagtccatcagcgttgacggccaaaggttcctcttctcccctgatgaagaaaagaagagaagagagaaagaaccaaagagagaagagaagtaaagaagttaaccccttagctcttctaaaacttttataacttatattatattattatacctataagctttaagacttataggttataatattaaagtttaagactgatggttaactttaagtacttaaggtttttaaagtcttatagttacttcaagtattaatagttattttaagttttaaagtcttaaacactgatgtaaagtttatatccttaagtgctaagcctttaaggttttatacttaacttaggtgttaaggtttaaagctttatacgtttaactgttaaggttatatatttactttaagactttaaagctttaatgtttatttataactttaagtgctaagctcttgaagttttatatgtactttaagtgtgtaaggctttaagactgatgccgagcccttgaggggctcggtgctaagcgttaaggttttaagggcttagcgcttagacttgaagctttaaagtgtttggtagactgatggatgtaagggtgaaagccgcgtcagcggatttcggccttgcgtccagctggctacctgtccagcctagcatatgccacctgggatgagtcaaactggtggatttggctctataggcgggattgaggggtgtaaacgggtgtttttggtagtaaaggtccaaaaattaaacctaaacttttccttaaattttcttagagtcttgtaacctttgagggtggttcaagctgaaacccctagtcagaacgggtttcactcccggacagctgtcacactttactcttgtgtcctttccgaacacgctaggcccatcagtgctgagggtattccctcaggctttcgagtactcgtcgctgaagctcctcatactctcaagccttccctgatggcgtgtactcctttcagggctgtgcctgctcgggctgatgccgagcccttgaggggctcggtgcgaagtgttaagaccctaaggttaacttaagtacctcaggcgtgaaggctggtactcccccttctttcttttaccgtgtccttcttcccccccacagtatccaacactgtccacatagttgaggcttagctaagcatgatggtggctgatggtctgtgtctggatatagcggatcgcgtatcaggctcttgggggcgtctagaatcgatcagaatatgctgggggtataaatacctagcccccaccctgtaaggcgctcctaggcgccgtgtcacagctttaaacggtatttctgggctacaccctccacgccagatcgacagagtggcctcgagagtgcacaccaagccaggaggatgtgatacatctcacacacctagatgatagatcttatttctcagcttggcaccttgactcgctagatcatctaccgaacctgctatcacccagacatacccctcagacgccctagaagggccctagaatcgatcagaagggccaaccctgcataatcccacccctagaagatttgagacgcagagagaggcaataaaggcttcagtgacatctgtcacacccgacacacccccatgaaacgctcaatccggttgagcgcagccttgactatggattacaaccctcacaccataaaaacaacaacaaccaaccaagacaatccagaaaggaacatcacccatggatggcacactcatcaccccatccttcacatccctctacaggcagacagaaattgaccccctcagcctccacagcctcaccggaaaccacagcgaggacattgatctcgacatggtgcgccgcatgtaccacgccaaagtacaagaagccatacgactcatccgacccgactggactgtcaccctcgacggcgccctatacgggccacccgactggcgccacctatccgagaatgaggccgaggaactccatgatctcatcgacatgatcgacgtagacgccatccttgtcgcatccacccactaaaccatcaacaacgttatcagcaacaaaaaggacatcatcatgcagaagatcgctgaccacttcactcagctctacacccccgccagctacgcctgccccacacccttcgacctgacacgcctccaaaacattgacagcaacctgctcgacttcgagggcctcgccgaagcctaccggcaatgcgtagaagccgaactccacaagctgcgcccccacaccttcatcgcatccgatggcaccgtgttcagccacaacgagtgtaagccactcaccggcggtgaagccacacaactctactggaatgtgagccgcatcaacgtaggccatctactcaccctgtgtgcccgataaaacccctagccacacaaggatcgctcacaacatttgagcgcagtcttgacacgaggtccagtcactggaagtattgatcatgtcagcaacgaacaacaccccagaaaggggccaacagtcatgaacaagaaaaacggctacaccatcgccggaatcacagccgccatcatcgccgcagcatccttcctgccagccccagacgacaatccgccactcacctcacagcccgccccacaggccaccacagccaacaccgaatggacccccaagactactcaacagtgcaaagccgagaaagcggcacggcaggcagccgccacccgctccatacaagccgagcaggccaaagctcacaagcaagctcaagcaaggggggaagaaaccgccaccggactcaccatgatcacggcagcacacacctgcaaccgcaaagccgaacaacaggccgccgcacacggtgtcaactggaacggcaaccccgacatcgacctccaactccacaaaaatattggtaaagacaccttctccatcgtctacggcgcaaccgcgaaacagcccggcgcatccaaactacccgtcaccgtccactgcctcgtcaccggaacagaagaccaccccaacgtcaccgacctcaacatcaacccgcaacagtaacccgccaaggagcattcccccgctatgtctctcctatcccactacgctgtcaccacaggactcgccgacacggcacacattattctccacaccggcggcacactacgcacagccaccgacatcgcttcccgcatcaacaccctcaacccagacatcaacctcgaccaccaaatcaaacagctacaaaccatcgaaaccgacctgtacaacatctacaaaaccatcaacaccatcatccaggaacagtcatgaacacacccaacaacatcgagttgcacagttacgaaacattcttcaccagcctcgcctggatccaaggcgccatcatcacatggatgtacgccaccggcaccccccacaaggcagccctcgccatcatcgccgcatgagccctcaccaccctcctaggcgcctccacactcaccaacaatccccgagacactaaatgatcacaacacccatccttatcgctgaaaccctcgccatcatcattctcgccgtagcactcgcccacaacaaccagtaacccacgcttaaggagcacacaccccatggatgagccaacccgcatgtacaccgaccccaacaccggagcccgaaaagaattgaaactctgcaggctctccctcatcgaccccgcagccttgcacgatctaggctccgtggcaggctacggcgccaccaaatacggcgacaacaactggaccggaggatacccgtggagccacagcgtcgacgccctataccggcacctactatcatggcagcaaggcaataacctcgaccacgaatccgggctaccccatctagcccacgccgcctggcactgcctcgcactcctcgcataccagcaacacgatgccggccaagacacccgcaacccatggaacaaaagcgacaagtaatgcctctatcacaatatccgaaaaccatcaaccatccaggccacatctcctacagttcactcacccagtgggccgaatgcggagaaaaatggcgcctatcccacggctaccatgcccaacaccacacctggtacgccaccatcgccggaagcaccatacaccacatcaccgaacaatacgacctacacctgtacaatcccgccgaataccccgaaatacccgacaacctctcatccttcaacaatgttttcgacacccaagtcgaccttgtccaatccgagggtacggaaatcaaaccctccggcagaacatgcaaaaacatgtgcgagtcgggcgggccacacaagaaagactacgactggtggatggtttacggccccacctttgtggaccgctggaaaacatggaggcgcaaccacccagaatacatcaccgcaatcctggacggtaaaccagccatcgaatacccggtagaaaccatcctcgacgatgacacaaaaatagtaggctacatcgaccgcgttttcaccgacaccgacaccggcgaaaccttcatcctcgacctcaaaaccggacgcctacccgccgacagtatgcagctgcacacataccggtacatgctcaaccaacacggcaacgatgtgacaaaaggcatgttttggacgccggccaccagccgcaacgacgataaatcccccgcacagggcacatctaccgaactctacgaccttgacaacaacacctaccggcatgtatcatccatgtacagtcaagcaatgaaaggaatcagtcaaggcatcttcgtcccacacgtcacaacactctgtaaaggatgccctgtgcaagacgcctgctgggccgtcaacggcaaaaactcgtacagatacccggtagaatccaccgtacagccaccagaaacagacaataaagaaaaggacaccaaatgaccgataaagacaagatcgacaatgatcgactcacgatcacactcaaatatggtggagactatgctgcaccatgggcggtcatccgcggagacacagcagagcagacaaaacaggccatcatcgacctgctaggcggactcaaaaacgataacgtgtccaaagactgggacctcgcaacactcgtagcgagcgcatcaatcatcctccaagaccgatacaaccaggcagccaaaaactacgtagacaacatcacatcccaagaaaacgatatcgtcatcgacaaaatcaacaaagcaacaagcaaagcacagctagcagacctcctcaaacagtacaagaagaccatcaccagcaacagtgacgtatccgaggctttccgaaacaaacgaaacagcctcactcgataaaccaatataagacaacaaaaacagacacaacagtaaaggataacacaatcatggcactcgccaactaccgcaacaacaacagcaacagcaccttcttcaacccgtccaaaaaccaggacgccaccgccatcgccttcaaaatccacgatgtggagcacaacaccgaaggctacggtggacaaaccgccgaccgtatctacgctgatgtgaccatcttccacaccctagacgatctcaacaacggcaccccagaaaccatccccaacgctattattgagaaagcgcgaggcaacaacgaccgcccacactccatgatccgcgaactcgaagcataccttggcgaggagcaggccttcaaactcgccaccgtgcgcaccaaaaacgggttcaacgcggtcgtgctcaaaccccttgatgacgccatctacgataaggttgccgaatacgtagacaagcgcgataatggccggctagacgacaccacagcctcaactgatgctgatatcgatatcgactccatctgaccaccaaaacacaaccaaccgataggcagatagattaaggttccgatgctctctctacaacgatccttcgagagagcctcccaaaccgcagccgagctgccccgcataccccagctagaacccctcaaccgcaaccaggacatgcacatccacaaaggggacctagtcatgatcgcgggccgctccggcagccaaaaatccgggctagccatgttcatcaccgccatgctcaaccagccagccctctacatatcaggggacatgacaccctgggaggcctccacacgaatcatctcactcaacacccaacacaccaccacacagatacaacaaaacatcgacgactacgggccagaatactatcgagacagcatccaccacggccaacacatcacattctcattccagtcacccatcacatggacagacatcacaatggaactgcaagcctacatggaaatgtggaacactttcccaccactcattgttatcgacaacctgatggacatccaagactgcgagagtgactatcaggcacagcaagaagccatgcaatggatcacagcattaggcagggatactggctccaccatcatcgtcacccactacgcaaccgacaaaaccggctccgacatcgaacaccccccggcacggagggaaatcaaaaacggcctctccgaaaaaccacaactcatattgggagtctcactgtatggtggcgaagacaacggcaacgggctcaccatcccggcagaggctcgcaccgcagtgttgaaacagcgcaccggcaaatccagcccagacggaacaaaatatgagcggctcagggcatacccagaatacacattcttcgggccactcgccgaaaaacagccctggaacatgaccacaacacacaaaggactatcatgtcaacacaacaagcacgcaaccgccgagccggagccgaatgggaaacacgactcctccaccagctacgcgacaccggccatgatatagaacgactccacctgaccggccgcgaagacgaaggtgacctcatcctcacaaccggcaacaaaacctacattatcgaggcgaaagccgggcaaccacacctagcccaattcgtcaaagaagcaacccttgaggcacgcaactacgaaacacgccgaaacaaacaaaacaattccaccatcggactcgtagtaatgaaacagcgcaacaaaccctggagcgaagcctatgtggtatcaaccctcaacgagctcctcccacacctctgacacccgccgcctcctcgacacctaccggatacgctacaatccgtcacgaaacgagcaacacatcctctgcccactccacgacgaccaccagccctccatgagcatcaacctcgacaagggcgtctggtactgccacacatgcggtgtcggaggcggactcgccaaactacaacaacgattagaagaagaaaacccgaatgtacgacagcatacgcccatacaacattgcggaacgccgccgaatccagaaagcctcggcccgctacgaaacccacctcgaaaacatactcgacctgctctcagcaagaggcatcagcgaagaaacagcccgctaccaccaccttggatacatcgacaatgaccccatccccggccacgaaaactacaaccagtgcatcaccatcccctacatgtaccccgtttgggggcggccagccgaaataagaaaaatgcgtttccgctgctcactacaacacgactgcaaaacccacaaccaccccaaatatctaaccccagccggggacacaggctccatctacaacatggccgccatggccaacccgacagccgaaatgcacatttgcgaaggcgaattcgactccatgatcctcgaacaatgcggatggtcggccgtcgcaatcccgggcgccacctcgtggcaaaccttctggaccaaattctttgaaggctacgaccacatctacatctggtcagacccagaccccgcaggcgacaagatggcccaaaccctccaggcagcactcccccaagccgcccgtgtgcccctcactgtcggggatgtcacagacacctacctgcaggccggaaaaacagggttgacacaagcactagacactgtgctacaataaaaccacacaagcaacctaaaccaagaaaggtacactaaaacaccatggatcccctcgacacgtgcccaatccccaaccggcgcaacaccagccaagctgccaggaggcggatacgcctcgctatctgtgcagaaaaatgggccgacggagaagaccccacctacatcatgcacacctggggcaccacctatgacgggatgcgatccatgatccgcgccaaccccgacattaaactacccgacgacatggccaaacatttgcacaaagtatgccgggaagcctaccccaaaaacaagcccaacaggcaccgaagcggatgggaccagtacgagaaggaatactacacccacgaaatcctcttcctgaaccaattcaacatcccagccctcgaaatcctcaaccggctcgacgtctcgtggacaatgtggaaacaaatcatcgccgagaaccatctcacacggctccaagacgaaaccaacaatgcgtgccactggcgctatttgaaacagcaacatccagactggaccgaccagcaaatcacacaagcccaacacgccgggaacaacaccttcaaccagttcatgcaagacgacaggcccgtactgtgagcatcgcattcaaacccaccaccaaagacaagcaagccatacgcaacatcattgtcgacgcgtggctcgacgaaaaccaagtacgagacatgcccaataatttgctccagcacattattgaatactgctgggacgccttcacagccagcaaccggtacgccgtcgcagcgcaatactggcgaggccaaaatccacccgacagtgaacatcagcgcatactagtcggctactacaaaaccgctaaacaagccatgaacgcggccaaacaattccactggaacacccggatgcaacaacaatggaaaacatggatactacccgtacacaacggcaccgtgtcagagcatttcaccaaccagaaaacactcttcgacacataaaccagcaaccagggtgacgccgcactgccggagcatctacaaaacatcatgtgcggcaaaacactcaaccacacagacggcaccatcacatggtgcacccgcaaaccaggacacgacggcgactgccgcacaggatggcaaccaaccacacaacccctaggacatcatggcaaccaaaactgaaaccctcatccaacgctacggcaacaaggctgcagacgtgctcgccgacaagtccatacccgccacacagctagcccaaatgctcactgaagccggataccccatctccgccaccgtcatcaaagactaccgccgcaaacaagccaccaccaccccacgagaggaggatacccgatgatagacaatatagaccggctactcacacagctagccaaccacgacaacgccatcgacaccattaatgatgatctagccaacggaaccgtgcgccgtacacgcatctccgaatggaccttaccgaacggggaaacaggccgatccgtacaaaaaatcatcgaccaccaacccgcaacagacccctaccctgtagatgaactcgtagctaagctagcctgctggcagccaccacaaccagacacccacacccgggagtccagtgacgatacggctttcgtcatcggggcaggcgactcccaaatcggcaaaggcatccccagcggagaaacagcacacttcgccgacgcctatttgcgctccctcacagccgcaaaacactactggcaacaggcaggcaaaccgcaacgagtccacttcgcattcctcggcgacatgatcgaaggatacgtgtcacaaggaggcaacaacgcctggcgcacacaaacacccctcaccgaacaaatccggctcacccgcatggccatgatgcaactcgtccacatgttcgaccactgcaaaaacgtgaccatcacatccatccccggcaaccacggagaagccgtgcgcttcggaaaaggagtcaccacctacgacgactccttcgacgtggactgctgccgcgccatcgcagaagcctaccagctcaacaaccaataccccaacctacacttttatttccccagccgagacgaaatgaccaccaccgtcgatgtggccggaacacggatactgcacgcccacggacaccaatggcgcaacaaccaacactacgaatggtggcgcggccaagaattccacaacggcaccacatcccacatcctgatggccgggcaccggcaccacctagaaatctccgagcaaggacaacgcaccttcatccaatgcccatccatggaaggagaatccgtctggtaccggcaccgcacaggcgccaccggccaccccggactagtgtgctacactatccacaacaaaacaccaaacaactaccagatagcgagatgaaatagtgccatgagcagacgaccaacaaaagcagacctggccaccacagcatcgtgggtgtgggccacagaccatcatcttcgcacactcaaccgggcatgcaccaaaatagccggacactaccccgcaatcagtgcagacgacctgtaccaagactccctactatatattgcggtacgtgaacaataccacaacctagacaacaaacactacaccaaaatgtgttacagggtagccaaacggctagccaacaaaaccatacaacacctagaccaaccgaaacctttatccgatattattcatctagccgaccaccagacaagcatctaaaggagaaccccaattatggttaccacaacactagacgacggaacccaaaccaccgtcctccaaaccgtaggcgccaccaccacagcaatcatcaccaacacagaaaaccccgaaaccatcaccgccaaatacactattagcaaagacggcacaaccacctacagcatcagcggaaacacctatttgggagaccaccaacacattatcaaactcatgtacgactactgccactgtgtgggacgattcgacaccaccaacaccagcaacccagacaacctcgacaacctgttcaagggatgacacatgaaccggacctacaccaccgccgacatcattcaagccgcgcaatggatctggaactgcggtccatggaaaccgtccgtcgagccgggcatgccacccccaccaaccgcgccacaacaccacggcaacaacatagttagcatgatcgacctacagctagccatcgacgactacaccctcacatgtgaaccatctaaacagcgaaaacacctggcacggctggcagcattcagggaagtatacggctacgaccaaacctacgccacagcagcccaacgattaggcgtcacccggcaaaccgtgaaacagtgggcagaccagacactgatcacactcacccaatacgccaacaccaccagcaacaccggctacgatgaagaggaatagaaacaatgcccagcaacagacaacgaacagtcacagccctcacagccgcggcccgccgcatcgtacagcagcagccacgaaacatgacagaactcgcaaacattacctgcagtatcagcagcgaatacctggttcccatcacttcgacaacatcagcctcaacgccaacggtgtcagcctagacgatattgatatggacgcagacaccagggacgcatgccaagaaacactgtggaactgcaaccttgcagaacacccggacaacaacaagccggcctgtcaggcggccctagacgagcttgcatgcatcaccaaccaggccctaacactacaaatcatggcaaacaacattatcgaggccatctacaatcaccgcgacaactatccaggcatagcaaaacaaaacattgtcgaccaggctgaaaacaccctcgccgaatgcgcactcctacaacagacactcgaagacaccctagacgacaacctgtaaaacccctgtagacacaaaaatagtgccccagcagcaaccaccacacgatcgtggcagcaccgctggggcacacacatatattcacttatgcaacagtagactctaccgtgccaacttccgactcagcagcacgcctcggcacatagcctccagcatcggcatcgtcgataggctctatcatgccaggatccgtttcgtcaaccatgtgagactccactattccaggatcatccggtggaacaagcccagcatccacaacaggcgtcgttttcggtttaccggcaacaaacgacgggttaccaaacgaggtagcaaccgacaacaccgcagccaccgttgctgttatcaaggcagattcccacggcaaaccgcgaaacgactccgcagtatacgtgacacccgccgtcacccccaacaccgcaacaaacgtttgcacaaaagtcttagccgcccgctccagtaaacctagccaaaactgtttacccacaacaaaccaccatcactttttcaaaccgttaacagcagactcgagcctgtcaatacggctgcgacactccagcacgtaataccagacactccacaaagcatccttggtgcgccacagcttcccagacaccggattcttcacccacgacagggcatcaacacgtttacccaaatcaccattctgcacctgcaccacaccaacatcatggtgcagcttattgaccgaaccagtaagctgagcagacaattgtttaatctgatcatgcaaggctttcacatcagccaccgttaactcctcattctctccactgccgccgttcacgacggccataaacctgtcccacggaaaccacggccccggatcgtcatgatccgactgatgccacgcatccgtcacatccgtgtgcccgcagatgccccgcctgccagcc

SEQ ID NO: 65 - DNA, 11292 bp, Pahexavirus sp.
  source 1..11292: mol_type = genomic DNA
cagagtttatgtgggctgatgctgattaccgtctgggtgttttgcaggatctgatttcgcctgctttgggtgcttcgattggtcgcgccgtggatctgattgctttccatggtgttgatcctgccactggtaagcctgccgcggctgtcaagacttcgctggataagacgaagaagacggttgatgccacggattctgctacgaccgatcttgttaaggctgtcggtcttatcgctggggccggtttgcaggttcctaacggtgttgctttggatccggcgttctcgtttgccctgtctactgaggtgtatccgaaggggtctccgcttgccggtcagcctatgtatcctgccgccgggtttgctggtttggataattggcgtgggctgaatgttggtgcttcttcgactgtttcgggtgccccggagatgtcgcctgcctctggtgttaaggctattgttggtgatttctctcgtgttcattggggtttccagcgtaacttcccgatcgagcttatcgagtatggtgacccggatcagactgggcgtgacctgaagggccataatgaggttatggttcgtgccgaggctgtgctgtatgtggctatcgagtcgcttgattcgtttgctgttgtgaaggagaaggctgcaccgactcctcctccggccccgaatccgccgaagcctgagcctaatcctccggctggtaactgatataagataagcgaatgtgtactatgtgcagggggtggtgttgatgggtatcattttgaagcctgaggatatcgagcctttcgccgatattcctgaggggaagcttgaggcgatgatcgccgatgtggaggctgtggctgtcagtgtcgccccctgtatcgctaaaccggatatcaaatatagggatgctgctaaggctatcctacgtagggctttgctgcgctggaatgataccggcgcgtcgggtcaggtgcagtatgagatggcggggccgttctcccagactacacggtctaatacgcccacgaacctcctgtggccttccgagattgccgcgttgaagaagttgtgtgagggtgatggtggggctggtaaagcgtacactatcacaccgaccattcatggcggatatgcacactctgaggtgtgttctactgtgtggggtgagggttgctcgtgcgggtctaatattaacggctacgctggccctttgtgggagatatgatatgaccagttttccttacggtgaaacggttgtgatgcttcagccgactgttcgtgtcgatgatcttggtgacaaggtggaagactggtctaagcctgtcgaaaccgtgttccataatgtggccatctatgcttccgtttcgcaggaggatgaggcggcaggccgtgactctgactatgagcattggacactgctttttaagcagcttgtcaaggatgctggttatcggtgtcgttggcgtataaggggtgttgtgtgggaggctgacgggtctcctatgatgtggcatcatccgatgactggctgggatgctggcacgcaggtgaatgtgaagcgtaagaagggctgatggttgtggcacgtgatgttgatgtgaagcttaatcttcctggtatccgtgaggtgctaaaagcgccgggtgtgcagggcatgttggctgagcgtggcgagcaggtgcgacgtgccgcatcagcgaatgtaggcggtaacgcgttcgatagggcccagtatcgtgcagggttgtcgtctgaggtgcaggttcaccgtgtggaggctgtggcccgtattggcaccacctataagggtgggaagcgtattgaggcgaagcatggcacgctggctaggtcgattggggctgcgtcgtgatcgtctacgatgaccccaggaagtgggctaaacgcgtgctcaaggatgatggctggctgtctgggataccatgcaccgggacagtgccggatagctttgagggtgaccttatttggttggctcttgatggtggcccacagttgcatgttcgtgagcgtgtttttttgcgcgtgaatgtattttcggatacgccggatcgtgctatgagcctgtcgaggcgtgttgaggctgttctggtggatggtgttgatggtgacccggtggtgttttgtaggcgttcgacgggtcctgatcttttggtggatggtgcacgttttgatgtgtattcgcttttcgagctgatatgtaggcctgtcgaatctgagtaaacgtatttgtttttgttttaatgtaattgtttgatatttaatgggggttgtgatggctgcaacacgtaaagcgtctaatgttcgttcagcggttactggcgatgtttatattggtgacgcgcacgctggtgatgctattgatggtgtgaaagaggttccttcggggcttacagctttagggtatctgtcggatgacgggtttaagattaagcctgagcgtaaaacggatgattcgaaggcttggcagaatgcggatgttgttcgcactgtggctacggagtcgtctatcgagatttctttccagctgatcgagtctaagaaggaggttatcgagctgttttggcagtcgaaggttactgccggagccgattcgggttcgttcgatatttctcctggtgccaccactggcgtgcacgctctgttgatggatattgttgatggggatcaggttattcgctactatttccctgaggttgagttgattgatcgtgacgagattaagggtaagaatggcgaggtgtatgggtatggtgtgacgttgaaggcgtatcctgcccagattaataagactggtgatgcggtgtctggtcgggggtggatgacggctttaaaagctgatactcctccgactcctcctccttcgccgaagccggatccgaatccgccggccggtaactgatacacgattttagggattgttgatagatgagtgacacaggttacacgttgaagattggtgaccgtagctgggtgttggctgatgctgaggagacggcgcaggctgttcctgcccgcgttttccgtcgtgcagctaagattgcccagtcgggggagtctgcggatttcgcccaggtcgaggtgatgttttctatgttggaggctgccgccccggctgacgctgtggaggccttggaggggcttcctatggttcgtgtggccgaggttttccgtgagtgggtggaatacaagcctgacggtaagggtgcctcgctgggggaatagtttggctccacggcctgattgatgattatcgtggggccatcgaatatgatttccgcaccaagtttggtgtttctgtttatagtgttggtggcccgcagatgtgttggggtgaggctgttcggctggctggcgtgttgtgtaccgatacgtcgagccagttggcggcccacctgaatggttggcagcgcccgtttgagtggtcggagtgggcggtgctggacatgttggatcattataggtctgctaatagtgaggggcagccggagcctgtggcgaggcctacggatgagcgtagggcccggtttacgtctggacaggtggacgatattttggcgcgtgttcgtgccggtggcggggtgtctcgcgagattaatattatggggtgaatagtgtatgtctggtgagattgcttccgcatatgtgtcgttgtatacgaagatgcccggccttaaaagtgatgttggtaaacagctttctggggtgatggctgctgagggtcagcgttcgggtagtctttttgctaagggcatgaagttggctcttggtggtgccgcaatggtgggcgccatcaatgttgctaagaagggcctcaagtctatctatgatgtgactattggtggcggtatagctagggcgatggctattgatgaggctcaggctaaactgactggtttgggtcacacgtcttctgacacgtcttcgattatgaattcggctattgaggctgtgactggtacgtcgtatgcgttgggtgatgcggcttcgactgcggcggcgttgtctgcttctggtgtgaagtctggcgggcagatgactgacgtgttgaagactgtcgcggatgtgtcttatatttctggtaagtcgtttcaggatacgggcgctattttcacgtcggttatggctcgcggtaagttgcagggcgatgacatgttgcagcttactatggctggtgtgcctgtgttgtctttgctggctaggcagacgggtaaaacgtctgctgaggtgtcgcagatggtgtcgaaggggcagattgattttgccacgtttgcggctgcgatgaagcttggtatgggtggtgctgcgcaggcgtctggtaagacgtttgagggcgctatgaagaatgttaagggtgccctgggttatcttggtgctacggctatggcgccgtttcttaacgggttgcggcagatttttgttgcgttgaatccggttatcaagtctatcacggattctgtgaagccgatgtttgcgtcggtggatcaggggattcagcggatgatgccgtctattttggcgtggattaaccgcatgccgggcatgatcacgagaatgaatgcacagatgcgcgccaaggttgagcagttgaagggcatttttgcaaggttgcatttacctgtccctaaagtgaatttgggtgccatgtttgctggcggcaccgcagtgtttggtattgttgctgccggtgtggggaagcttgttgcagggtttgccccgttggcggtgtcgttgaagaatctactgccgtcgtttggtgctttgaagggtgccgctggcgggcttggtggcgtgtttcgcgccctgggtggccctgtcggtattgtgatcgggctgtttgcggcaatgtttgccacgaacgcccagttccgtgccgctgttatgcagcttgtggctgtggttggccaggctttggggcagattatggccgctgtgcagccgctgttgggtttggttgccgggctggtggcacggttggctcccgtttttggccagattatcggtatggttgccgggttggctgcgcagcttatgcctttgattagtatgcttgtcgcccggctggttcctgtgatcacgcagattattggtgcggtgacgcaggttgctgcaatgttgttgccggcgttgatgccggtgttgcaggctgttgtggctgtgatacggcaggttgttggcgtgatcatgcagttggtgcctgtttttatgcctgtgattcaacagattttgggtgctgtcatgtctgtgctgccgccgattattggtttgatccggtcgctgataccagtcatcatgtcgattatgcgtgtagtgatgcaggttgtttcggttgtgttgcaggtggtggcccgcattattccggttgtgatgccaattgtgacaactgtgatcgggtttgttgcgcgtattcttggcgctattgtgtctgctgcagcccgcattattgggactgtcacccgtgtcatctcatgggttgtgaatcatttagtgtctggcgtgaggtctatgggcacggccatcttgaatggctggaatcatattagagcgtttacgtctgcgtttattaacggtttcaagtcgatgatttctggcggcgtgaacgcggttgtggggttttttgcccggcttggttcttcggttgccgcccatgtgaggtctggttttaacgcggctcgtggcgccgtttcttctgcgatgaatgctatccgtagtgttgtgtcttcggtggcgtctgctgttggcgggtttttcagttcgatggcgtctagggttcgtagtggtgctgtgcgcgggtttaatggtgcccgtagtgcggcttcttctgctatgcacgctatgggctcggctgtgtctaacggtgtgcatagtgtgatagggtttttccggaatctgcccagcaatattaggggtgccttgggtagtatggggtccttgttggtgtctgctggccgtgatgtggtggccggtttgggtaacggtattaagaatgctatgagtggcctgatggatacggtgcgtaatatgggttctcaggttgctaatgcggcgaagtcggtgttgggtattcattccccgtcgagggtgtttcgtgaccaggttggacggcaggttgttgccggtttggctgaggggatcaccgggaatgctggtttggcgttggatgcgatgtctggtgtggcttcgcagcttccggatgcggttgatgcccggtttggtgtgcgatcgtcggtgggttcgtttaccccgtatggtaggtatcagcgtgccaagggtgagagtgttgtggtgaatgttaacggacctacgtatggtgatcctgccgagtttgcgaagcggattgagcggcagcagcgtgacgctttgaacgcgttggcttacatgtgattgagggggtatgcatgtttattcctgacccgtctgatcgtgccggtttgactgtggattggactatgtttccgttgtttcgtaatgctccggagcgtgtgcttcatttgacggattatacggggtcgtctcctgtcatgttgttgaatgattcgttgcgcggcttgggtgtgcctgaggtggagcagttttctcaaactcatgttggggtgcacggttcggagtggcgcgggtttaatgtgaagcctcgggaggtgacgctgccggtgttggtgtcgggtgttgacccggatccggatggcgggtttcgtgacggttttttgaaggcgtatgacgagttgtggtctgcgtttcccccgggcgaggtgggggagttgtcggtgaagacccctgccggccgtgagcgtgtgctgaaatgccggtttgattcggctgatgacacgtttacggtggatccggtgaaccgcggttatgcgcgttatctgttgcatttgacggcttatgacccgttttggtatggggatgagcagaggtttcgtttcagtaacgcgaagttgcaggattggttgggtggcggccctgttaataagaagggtacagcgtttccggtggtgttgacgcctggtgttggttcgggctgggataacctgtctaataagggtgacgtgcctgcgtggcctgtgattcgtgttgaggggcctttggattcgtggtctgtgcagattgatggtttgcgtgtgtcatcagactatccggttgaggagtatgattggattactattgatacggatcctcgtaaacagtctgcgttgttgaacgggtttgaggatgtgatggatcgtttgacagagtgggagtttgcgcttattccgcctggcggttctcggagtgtgaatattgagatggttggtttgggtgccattgttgtgtcggtgcagtaccggtttttgagggcttggtgaatggttgatggctggtcttgttccgcatgaaacgttgtttacgccggattatcgccgtgtggcgcctatcaatttttttgagtcgttgaaactgtcgttaaagtggaatggtttgtccactttggagttggtggtgtcgggtgatcattctaggcttgacgggttgactaggccgggtgcacggctggttgttgattatggtggtggccagattttttctgggcctgtgcgtaaggtgcacggtgtgggcccgtggcgttcttcgcgggtgactatcacgtgtgaggatgatatccgcctgttgtggcgtatgctgatgtggcctgtgaattatcgtcccggtttggtgggtatggagtggcgtgccgacagggattatgcccactattcgggtgcggctgagtcggtggctaagcaggtgttgggggataatgcttggcgttttccgcctggtttgtttatgaacgatgatgagggtcgtggacgctatattaaggattttcaggtgcggtttcacgtgtttgccgataagttgttgccggtgttgtcgtgggctcggatgactgtcacggtgaaccagtttgagaatgcgaagtttgatcagcgtggtttggtgtttgattgtgtgccggctgtgatccgtagtcatgtgttgactgccgagtctggtacgattgtgtcgtgggagtatgtgcgtgacgcccctaaggcgacatctgtggttgtgggtggccgcggcgagggtaaggatcggctgttttgcgaggatgttgattcgatggccgaggatgactggtttgatcgtgtagaggtgtttaaggatgcccgtaacactgattctgagaaggtgtctctcttcgatgaggctgagcgggtgttgggggagttgcaggcttcgtcggggtttaagattgagttggctgagtcggatgtgttgcggtttgggcccggccgcctgatgccgggtgacctgatctatgtggatgtgggttctggccctattgcggagattgtgcggcagattgatgtggagtgtgattcgcctggtgacggctggacgaaggttactcctattgccggcgattatgaggataatccgtcggcgttgctagcacggcgtgtggctggtttggctgccggtgtgcgggatttgcaaaaattctagaatgatgggggtttgttgtggctattgtgtgtaaagggtttgatggtgtgttgaccgagtatgattgggctcaaatgtctggtctgatgggtaacatgccttcggtgaaagggccggacgattttcgcgtcggcactactgttcagggtgccacagtgttgtgtgaggttttgccggggcaggcttgggctcacggggtgatgtgcacgtcgaatagtgttgagacggtgacggggcagcttccgggccctggtgagacccgctacgactatgtggtgttgtcgagggagtgggagcagaacagggacaagttggagattgttcccggggggcgtgcggagcgtgcccgtgacgtgttgcgtgcggagcctggcgtgttccatcagcagctactggctactttggtagtgtcgtctaacgggttgcagcagcagctggatcggcgtgctgtagcggccagggtggcgtttggggagtctgctgcgtgtgatcctacccctgtggagggtgaccgtgtgatggttccttcgggggctgtgtgggctaaccatgccggcgagtggatgttgttgtctcccaggattgagacgggcactaagcagatccagtttggcgggtctgctgtgtatgcttacacgatcccgtttgagcggccgtttagtagtgcgcctgttgtggtggcgtctatggctacggcggctgggggtacgcagcagatcgatgtgaaggcctacaatgtgactgcccaaaattttagtttggcgtttattacgaatgatggttcgaagccgaatggtgtgcctgcggtggctagctgggttgctgtcggcgtgtgaatttgtttgttgtggcgtgatgccgtctgcgttggggggctggcgtgtcgtgggttactcctgcactggtggcttctgcgtgtacagcgttggccactattttgggatctgttcaggcggtcacgtctagatcgaggaagcgtttgcgccgcctgtcggcgcaggtggatgctttggaagagtatacgtggtgtgtgcggcgcgaggtgcgccagtttaacgcccggcttcctgacagggttgatccgattgttttgcctgagttgcctagtttcctgtcggacacgttggggggtgaatgatgagggagttggaggaagaaaaaaggcagcgccgcaattttgagaaggcttccctgatactgttgtttttgtcgcttgtgctgttggcggtggttgctgggggtgctttgcgtttcggatcggtgtcttctgtgcgggattcggagcaggctcgggccgagtcgaatggtacagcggctaagggtttagccagtcgtgtaaagcaggtgtgtacccagggtggtgtggagtctgttaagcttcaccgttctggtttgtgtgtggatgctgcccgcacggagcggagtgttgcgggtgtgcccggtccggctggtgtgcgtggcccgcaaggccctgcaggtgtggatggccgggatggtgttaatggttcggctgggcttgttggccctgttggtccgcagggttctcctggtttgaatggtgtgaaaggtcctgacgggttgcctggtgctaatgggtcggatggccgtgatggtgttccaggccgtgcaggtgctgacggtgtgaacggcgttgatggcactgctggtcgggatggttcggccggtgagcgcggtgatgtgggcccctcaggtcctgccggcccccaagggctccagggtgaacgaggtgagcgcggccccgccggtgcgaacggatccgatggtaagaatggtaaggacggcaaggatgggcgctcggtggtgtctgtgtactgttctgagggccgcctggttgtgaaatatagtgacggtgtggcttctacaatatcgggttcggtggcctgccagggtgtgaaaccgtcgcctatagtgactatatcatcccacaaatagaaaggagtggctgtgatggtagtgtttggtggtgacatgttgtgaggtttattcctgcggcgcatcattctgccggctcggatagtccggtgaatagggttgtgattcatgcgacatgcccggatgtggggtttccgtccgcttcgcgtaaagggcgggctgtgtctacagcaaactatttcgcttccccatcgtcgggcggttcggcgcattacgtgtgtgatattggggagacggtgcagtgcttgtctgagtctacgattggttggcatgccccgccgaatccgcatagtttgggtatagagatttgcgcggatggcggctcgcacgcctcattccgggttccagggcatgcttacactcgggagcagtggcttgacccccgggtatggcccgcggtggagaaagctgccgtgctgtgtagacgtttgtgtgacaagcatggtgttccgaagaggaagcttagtgcagccgatttgaaggccggtaaacgtggtgtttgcggccatgtggatgtgacggatgcgtggcaccagtcggatcatgacgatcctgggccgtggtttccgtgggacaggtttatggccgtagtctgcggcggtagtggtagtgaggagttaactgtggctgatgtgaaagccttgcatgatcagattaaacaattgtctgcccagctcaccggttcggtgattaagctgcaccatgatgttggtgtcgtgcaagtgcagaatggtgatttgggtaaacgtgttgatgccctgtcgtgggtgaagaatccggtgacggggaagctgtggcgcactaaggatgccctgtggag

SEQ ID NO: 66 - DNA, 13455 bp, Pahexavirus sp.
  source 1..13455: mol_type = genomic DNA
cgatacgactatgtggtgtagtcgagggattgggagcagaatacgtacaagttggagattgttccgggtgggcgtgctgagcgtgcccgtgatgtgttgcgtgcggagcctggcgtgttccatcagcaactgttggcgacactggtgttgtcgtctaacgggttgcagcagcagctggataggcgtgctgtggcggctcgtgtggcgtttggtgagtctgcagcctgtgatcctacccctgtggagggtgaccgggtgatggttccttcgggggctgtgtgggctaaccatgccggcgagtggatgctactgtctcccaggattgagacgggttcgaagtcgatcatgtttggcgggtctgctgtgtatgcttgcacgatcccgtttgcccgccagttcagtagtccgccggttgtggtggcgtctatggctacggcggctgggggcacgcagcagatcgatgtaaaagcctacaatattactaataaagattttggtttggcgtttatcacgaatgacgggtctaagccttctggtgtgcctgcggtagctaactggattgctgtcggcgtgtaatgcgcggcttgcgtgtgcgggacgtgttgtggtggttgtagtggtagggggctgtagtgccatgggttacacctacgcttgtagcctctctttgtaccgctatcgctactgttcttggttcgattcaggcggttacttacaggtcgaagaagaggctgaggcagttgtctgcgcaggttgatgcgatggaagagtacacatggaatattcgccatattgttcaccgctataacgcgaatctgccggagaatgttgagccggtaaagatgcctgatttgcccgagtttttgaaagatactgttgatggtggtggggggtgaattgtgagggagttggaggaggagaagcggcagcgccgctcgtttgagaaggcttccctgatattgctgttcctgtcgcttgtgctgttggtggcgatggctgggggtgctttgcggtatggttctgtggcttctcaaagggattcggagcaggctaaagcccagtctaatggtacggcggctaaagggttggctgcccgtgtgaagcgggtgtgtgcccagggtggacgggagtcggtgcgtcttcaccggtctggtttgtgtgtggatgcacagcgtgttgagcagagtgtgcagggtgttccgggtccggctggtgtgcgtgggccgcaggggccggctggtgttgatggttcggcgggtgttgttgggcctgttggtccgcagggttctccgggtttgaatggtgtggctggcccgcaagggttgcctggcgctgacggcaaggatggccgtgatggtgttccgggccgtgcaggcgtggacggtgtgaacggcgctgatggcaaggatggtcctgccggtccccctggcgctgacggtgcacagggtgtacagggtgagcgtggccctgccgggcctgccggtcctgccggttctgttggtccgcagggttctgccggtgccgacggtacgaatggtcgggacggcaaggacggtaaggatggcgctgatgggcgctcggtgatatcggtgtactgttccgggggtcgcctggttgtgaaatatagtgacggtgtggcttctacaatatcgggctcggtggcctgccagggtgtgaaaccgtcgcctatagtgactatatcatcccacaaatagaaaggagtggctgtgatggtagtgtttggaggtgatgtgtggtgaggtttattcctgcagcgcatcactcgtccggctcgaatagtccggtgaaccgggttgtgattcatgcaacatgcccggatgtggggtttccgtctgcttcccgtaaagggcgggcggtgtctacagcaaactatttcgcgtccccatcagcgggtggttctgcgcattatgtgtgttatgttggggagactgtgcagtgcctgtcagatgggactattggttggcatgccccgccgaatccgcatagtttgggtatagagatttgcgcggatggcggttcgcacgcctcgttccgtgtgccggggcatgcttacacgagggagcagtggcttgatccgcgggtgtggcctgcggttgagcgtgccgccatcctgtgtagacgtttgtgtgacaagcatggtgttccgaaaaggaaactgtctgtggccgatttgaaggctggcaggcggggtgtgtgtggccatgtggatgtgacggatgcgtggcatcagtcgtatcatgacgatccggggccgtggtttccgtgggacaggtttatggccgtggtctgcggtcgcgatgagagtggggagttaactgtggctgatgtgaaagccttgcatgatcagattaaacaattgtctgctcagcttactggttcggtgaataagctgcaccatgatgttggtgtggtgcaggtgcagaatggtgatttgggtaaacgtgttgatgccctgtcgtgggtgaagaatccggtgtctgggaagctgtggcgcaccaaggatgctttgtggagtgtctggtattacgtgctggagtgtcgcagccgtatagccaggcttgagtctgctgttaacgatttgaaaaagtgatggtggtttgttgtgggtaaacagttttggttaggtttactggagcgtgccctgaaaacttttattcaaacgtttgttgccgtgctcggtgtgactgcgggagtcacctatacggctgagtcttttcggggtttgccgtgggaatcagctttgattactgcgtcggttgcggctgtgctgtctatagctacgtcgtttggtaatccgtcgtttgtggcgggtaaaccaaaggttgcgcctgttgatgttgggcttgtttcacccgatgatcctggaatagtggagtctcacatggttgacgaaacggatcctggcatgatagagcctatcgacgatgccgatgctggaggctatgtgccgaggcgtgctgctgagtcggaagttggcacggtagagtctactgttgcataagtgaatatatgtgtgtgccccagcggtgctgccacgatcgtgtggtggttgctgctggggcactctttttgtttatgcggtgcggttactgtgtgttgttgtggttggggtatcctgcactgtcgcagcaccacaggatttcgctgcactcgtctagcgtgtcctggtcgatgttgaggttgtcgaggctgacttcttgaacggtgaggttcacatcatcgagtgagatgggtatatggtactggttttcgacactgtcaacaatgttttgcagctggttcatgttggtgggctgttgttggatgattcggtgtaccgctgttttgagggcggtgtagagggtattggttgtggtatcgatcatcgtgttaagccattccttcgttatcgtctggcatgtagtatgtgctgtttgcgtagcctgttagggtgatgagtgtttggtctgcccactgtttcacggtttgccgggtgactccgagtctctgggcggctgtggcgtaggtttgatcgtagccgtatacttccctgaacgcggcgagcctggctagccgtttccgctgtttggatggctggcaggtgagggtgtagtcgtcgatggcgagctgtaggtcgatcatggtggcaatgttgttgccgtgatgctggggggcggttggtggggctggcatgcccggttcgacgctcggtttccatgggccgccgttccagatccattgcgcggcttggataatgtcggctgtggtgtaggttcgggtcactggtcatcccctgaacaggttgtcgaggttgtctgggttgctggtgttggtggtgtcgaatcgtcccacgcagtggcagtagtcgtacatgagtttgataatgtgttgttggtcgccgaggtaggtgtttccgctgatgctgtaggtggctgtgccgtctttactgatggtgtatttggcggtgatggtttcggggttttcggtgttggtgatgattgctgtggtggtggcgcctactgtttggagtatggtggtttgggttccgtcgtcgaggatggttttaaccattggggggttctccttttaaatgctgatttggttgtcggctagatgaataatatcggataaaggtttcggttggtctaggtgttgtatggttttgttggctagccgtttggctaccctgtagcacattttggtatagtgtttgttgtctaggttgtggtattgttcccgcaccgcaatatatagtagggagtcttggtacaggtcgtctgcactgattgcggggtagtgtgtggctactttggtgcatgcccggttgagtgtgcgaagatgatggtctgtggcccatccccacgatgcggtggtggccaggtctgcttttgttggtcgtctgctcatggcactatttcatctcgctatctggtagttgtttggtgttttgttgttgatagtgtagcacacgagtccggggtggccggttgtgcctgtgcggtgccggtaccagacggattctccttccatggatgggcattggatgagggtgcgttgtccttgctcggagatttctaggtggtgccggtgcccggccatgaggatgtgggatgtggtgccgttgtggaattcttggccgcgccaccattcgtagtgttggttgttgcgccattggtgtccgtgggcgtgcaggatttgtgtaccgaccacatcaacggtggtggtcatttcgtctcggctggggaagtggaagtgaaggttggggtattggttggtgagttggtaggcttctgcgatggcgcggcagcagtctacgtcgaaggagtcgtcgtaggtggtgactcctttgccgaagcgtactgcttctccgtggttgccggggatggaggtgatggtgacgttggcgcagtggtcgaattggtggatgagttgcatcatggccatgcgggtgagcctgatttgttcagtcaggggtgtttgtgtgcgccaggcgttgttgcctccttgtgacacgtatccttcgatcatgtcgccgaggaaggcgatgtggactcgttcgggtttgcctgcctgttgccagtagtgttttgcgactatgagggagtgcaaatagtcgtcggcgaagtgtgctgtttctccgccggggatgcctttgccgatttggaagtctcccgccccgataacgaaggccgcagtgctgtagtcggtgtgagagttgtcggctggttttggtggctgccattcggctagcttatcaacgagttcgtctacagggtaggggtttgttgcgggttggtggtcgatgattttttgtacggatcggcctgtttctccgttggggagtgtccattcggagatgcgtgtgcggcgtacagtgccgtttgcgagatcatcgcagatggtgtctgcttcgctatcgtggttggctagccgggtgaggagccggtctatattgtctatcatcggatatcctcttcttttttctgtgtggtgttggcttgtttgcggcgatagtctttaataacagtggcggagatagggtatcctgcctgggtgagctgttttgctagccatgaggcggggatggttttgtctgcgagcacgtcggcagccttattgccgtagcgttgaataagggtttcagttttggttgccatgatgtcctaggggttgtgtggtgggctgccatcctgtgcggcagtagccgtcgagtcctggtttgcgtgtgcaccacgatacggtaccgtctgtgtggttgagtgttttgccgcacaggacgttttgtagatgctccggcagtgcggcgtcaccctggttgctggtttgtgtgtcgaagagtgttttctggttggtgaaatgctctgatacggtgccgttgtggacgggtagtatccatgttttccattgctgctgtagcctggtgttccagtggaattgtttggccgcgttcatggcttgtttagcggttttgtagtagccgacgagtatgcgctgatgtggcttgtcgggtgggttttggcctcgccagtattgtgccgctacagcgtagcggttgctggctgtgaaggcgtcccagcagtattcgataatgtgttgcagcatgctgtctggcaggctgtcagggttgatggtggtgtttcgggtgatcatgtcacggatggcttgccggtttttggtggtgggtttgaacgagatactcacgatagtgccggctggtcgtcttgcatgaactggttgaaggtgttgttcccggcgtgttgggcttgtgtgatttgttggtcggtccagtctgggtgttgctgtttcagatagtgccagtggcacgcattgtaggtttcgtcttgtagccgggtgagatggttttcggtgatgatttgtttccacatggcccatgacacgtcgagccggttgaggatttcgagggctgggatgttgaactggtcgaggaacaggatttcgtgggtgtagtattccttctcgtactggtcccatccgcttcggtgcctgttgggcttgtttttggggtaggcttcccggcatactttgtgcaaatgtttggccatgtcgtcgggtagtttaatgtcggggttggcgcggatcatagatcgcatcccgtcataggtggtgccccaggtgtgcatgatgtaggtggggtcttcaccatcagcccatttttctgcacagatggcgaggcggatacgcctcctggctgtttggctggtgatgcgccggttggggattgggcacgtgtcgaggggatccatgatgttttagtgtacctttctggtttcgtgttgttgacgtgttttactgtagcacagtgtctagtgcttgtgtcaaccctgtttttccggcctgcaggtaggtgtctgtgacatccccgacagtgaggggcacatgggtggcttgggggagtgctgcctggagggtttgggccatctggtggcccgccttgtctgggtcggaccatatgtagatgtggtcgtagccttcgaagaatttggtccagaaggtttgccacgaggttgcgccgggtagggcgacggctggccatccgcattgttcgaggatcatggagtcgaattcgccttcgcaaatgtgcatttcggctgccgggttggccatggcggccatgttgtagatggagcctgtgtccccggctggggtcaaatatttggggtggttgtgggttttgcagtcgtgcgggagtgtgcagcggaaacgcatttttcgtatttcggctgggccgcccaaaaaggggtacatgtatgggatggtgatgcactggttgtagttttcgtggcctggtatggggtcattgtcgatgtatccaaggtggtggttgcgggctgtttcttcgctgacgcctcttgctgagagcaggtcgagtatgttttcgagatgggtttcgtagcgggctgaggctttctggattcggcggcgttccgcaatgttgtatgggcgtatgctgtcgtacattcgggttttcttcttctaatcgttcctgtagctgtttgagtccgcctccgacaccgcatgtgtggcagtaccagacgcccttgtcgaggttgatgctcatggagggctggtggtcgtcgtgaagtgggcagaggatgtgctgctcattcatggacgggttgtagcggatgcgatactggtcgaggaggcggcaggtgtcagaggtgtgggaggagctcgttgagggttgataccacataggcttcgctccagggtttgttgcgctgtttcatgacgacgagtccgatggtggactggctttctcggtttcggtgggtttcgtagttgcgtgcctcccggccggcttgtttcacgaattcggcgaggtgtggctgcccggctttcgcctcgatcacataggttttgtggccggttttgaggatgaggtcgccttcgtcctctttaccgttgaggtggaggcgttcgatgtcgtagccggtgtcgcgtagctggtggaggattctggtttcccattctgcgcctgccctgcggttgcgtgcctgctgtgtggccatcatagtcctttgtgcgttgtggtcatgttccatggctgtttttcgacgaggggtccgaagaatgtgtattcggggtaggctcgtagccgttcgtatcgggtgccgtctgggcttgactggccggtgcgctgtttcaacactgcgatgcgggcttcggctgggatggataggccttggccgttgtcatcacccgggtagagggatactccgaggatgagctgcggtttttcggagaggccgtttttgatttcccgcctggctggcgggtgttcaatatcggtgccggttttgtcggttgcgtggtgtgtgacaataatggtggagccagtatccctgcctaatgctgtgatccattgcatggcttcttgctgggcctggtagtcggattcgcagtcttggatgtccatcaggttgtcgatgacgatgacgggggggaaggtgttccacatttccatgtaggcttgcagctccatggtgatgtcggtccaggtgatgggtgactggaacgagaatgtgatgtgttggccgtggtggatgctgtctcgatagtattctggcccgtagtcgtcggtgttgtgttgtatctgtgtggtggtgtgttgggtgttgagtgagatgattcgtgtggaggcctcccagggtgtcatgtcccctgatatgtagagggctggctggttgaacatcgctgtgatgaacatggctagccctgatttttggctgccggaccgccccgcaatcatgacgagatcccctttgtggatgtgcatgtccaggttgcggtagaggggttctagctggggtatgcggggcagctcggcggctgtttgggaggccctctcgaaggatctttggagagagagcatcggaaccttatctatctgttacggtttgggcggagagtggtggtcagatggagtcgatatcgatgtcagtagaggctgtggtgtcgtctatctggccattatcgcgtttgtctacgtattcggcaaccttatcgtagatggcgtcatcaaggggtttgaggacgaccgcgttgaacccgtttttggtgcgtacggtggcgagtttgaaggcctgctcctcgccaaggtaggcttcgagggcgcggatcatggagtgtgggcggtcgtggttgccgcgtgctttctcgataatggcgttggggatggtttctggggtgccgttgttgagatcctggagggtgtggaagatggtgacatcagcgtagatgcggtctgcggtctgtccgccgtagccttcggtgttgtgttctacgtcgcggattttgaaggcgatggcggtggcgtcctggtttcgggaggggttgaagaaggtgctgttgctgttgttgcggtagtttgcgagtcccattgttgtttccttgactgtttgtgttgttttgtttgttggtttgtgtcggtttttatcgggtgaggctgtttcgtttagtgcggaacgcctctgacacgtcactgttactggtgatggtctttttgtactgtttgaggaggtcggctagctgtgctttgctggtggctttgttgattttgtcgatgatggtgttgtttccttctgatgcgattttgttgacgtagtctttggcggcctggttgtatcggtcttggaggatgatggatgctgtggcgatcagggttgccaggtcccagttccttgccgcggagctgtttttgagtccgccgaggaggtcgatgatagtcttctttacctggtcggcggtgtctccgcggatgacggtccatggggcggcgtagtctccgccgtatttgagtgtgacggtgaatcggtcgtcgtctgtgttgtcggtcactggtgctccttgtcttcttttgttggggctgtgatggtggtttctatagggtacctgtaggcgtctttcccgttgacagcccagcaggcgtccttgacggggcagcctttgcagagtgttgtgacgtgtgggacgaagatgccttgactgattcctttcattgcttgactgtacatggatgatacatgccggtaggtgttgttgtcaaggtcgtagagttcggtagatgtgccctgtgcgggggatttatcgtcgttgcggctggtggccggcgtccaaaacatgccttttgtcacatcgttgccgtgttggttgagcatgtaccggtatgtgtgcagctgcatactgtcggcgggtaggcggccggttttgaggtccacaatgaaggtttcacccgtattcgtatctgtgaatacccggtcaatatatccgactatttttgtgccgtcttggagggtggtttctacagggtattcgatgcctggctggccgtccaggattgcggtgatgtattgtgggtggttgcgcctccatgttttccaccggtccacgaagatggggccgtacatcatccaccagtcgtagtctttcttgtgtgggcccccgctttcgcacaggtttttgcattgccgcccggagggtttgatttctgtgccttcggattcggcgagggcgacttgggtgtcgaaaatgtttttgaaggatgagagtttgtctggcagtgcagggtattcggcgggattgtacaggtgtaggtcgtattgttcggtgatgtggtgtatggcgcttccggcgatggtggcataccaggtgtgggaggtggctttgtatccgtgttggaggcgccatttttctccgcattcggcccactgggtgagtgaactgtaggagatgtggcctggatggtggatggtggatggtttttgtgctagaggcattactggtcgcctttgtgggtgttccatgggttgcgggtgtcttggccggcctggtgttgctggtaggcgaggagtgcgaggcagtgccaggcagcatgggccaggtggggtagcccggattcataatcgaggttgttgccttgctgccatgataacaggtgccggtagggggcgtcgacactgtggctccacggatagccgccggtccagttgttgtcgccgtatttggtggcaccatatccggccacttcaccgagggcgtgaagggatgcggggtcgatgagggagagcctgcacagtttcaattcttttcgggcaccagtatcaggatcagtgtatatgctggttggcttatccttggggtgtgtgctccttaagtgtgggttactggttgttgttgtgggctagtgctacggcgagaataatgatggcgagggtttcagcgatgaggatgggtgttgtgatcattgggtgtttcgggggttgttggtgagggttgatgcacctagaagcgatgcgagggcgcatgcggcgatgatggcgagggcggctttgtggctggtgccggtggcgtacatccatgtgatgatgccgccttggatccaggctaggctggtgaagaacgtttcgtaactgtgtagctcaatgttattgttgggtgggttcatgcttgctcctgaagaatggtgttgatggttttataaatgttgtacaggtctgtttcgatagataacagttggtggatttcgtggccgagatcaatgtctgggttgagggtgttgatgcgggatgcgatgtcggtggctgtgcggagtgtgccgccagtgtggtgaatgatatgtgcggtgtcggcgaggccggtggtgacagcatagtgggagaggagaggcatagcggtccttggcgggttagtgttgcgggttgatgttgaggtcggtgacgctggggtgttcttctgttccggtgacgaggcggtggactgtgacggatagtttggatgcacccggctggcggacggtggcgccgtagacgatggagaaggtgtctttaccaataattttgtggagtaggaggtcgatgtcggggttgccgttccatttgacgccttgcgtggcggccttctgttcggctttgcggtcgcaggcgtgtgctgccgtgatcatggtgagacctgtggaggtttcttccccccttgcttgggcttgcttgtgggctttggcctgctcggctcgcagggactgttctgcggctgcctgccgtgccgctttctcggctttgcgctgttggacggttttgggggtccattcggtgttggctgtggtggcctgtggggctggctgtgaggcgagtggcggattgtcgtctggggctggcatgaatgaggcggcggcgatgatggcggctgtgatgcctgcgatggtgtagccttttttcttgttcatgactgttgtcccctttccggggtgttgttcgttgctgacatgattaatcatggtgtgggcggttcctcatgtcaaggctgcgctcaacgattgtgagcgtttggtgtgtggctaggggttttatcgggcacacagggttagcaggtggccaatattgatgcgggtcacgttccagtagagttgcgtggcttctccactggtgagtggcttccacgcgtcgtggctgaacacggtgccgtcggatgcgatgaaggtgtgggggcgcagcttgtggagttcggcttctacgcattgccggtaggcttcggcgaggccctcgaagtcgagcaggttgctgtcaatgttttggaggcgtgtcaggtcgaagggtgtggggcaggcgtagctggcgggggtgtagagctgagtgaagtggtcagcgatcttctgcatgattctttccttttcttgtgtggtgggttgatggtttttatcgtgtggcttcggcgatgatggcgtccacgtctatcgtgtcgatgatgtcgtggagttcctcagcctcgccataggtgagtggctgccagttgcgtggcccgtatgcggcgccgtcgagggtgacagtccacaggggccgtatgagccggatggcttcctcgactttggcacggtataggcggcagatgatagacggatgggtgttgcctatgtcacacccggtgaggtgtgcggggtggaatgggttgatttcggtttgagtgtacagggttgtgaaggatggtgtgacgagtgtgccatccatgagggtgtgctcctttcggtggtgtatgggttgttgtggtttctagagtgtgtaggttgcgaccccatagtcaaggctgcgctcaaacccagtgagcgtttcatgggatgtggcaggggatgtggcgtatctcacttaagcctttatggcctctctcagcgcctgaaatcttctgggggtaggattatatagggttgaccctgctgatcgattctaggggccttctagggcgtctcaggggcatgtctgggtgatagcgggtgtggcagatgattgagcgggttaagataggcctgcatcgcaaaggtcgaggtgccagatctgggcatggaatcaacaccctcatactatgtgagatgtatcacatactcctggcttggtgtgcaccttcgaggccaacatgtcgatctggcgtggagggtgtagcccagaaatg

SEQ ID NO: 67 - DNA, 14717 bp, Pahexavirus sp.
  source 1..14717: mol_type = genomic DNA
gatgatatacggccccacctttgtggaccggtggaaaaactggaggcgcaaccacccagaatacatcaccgctgttattgacggccagccaggcatcgaatacccggtagaaaccaccctccaggacggcaaccagatcgttggctacatcgaccgcgttttcaccgacaccgacaccggcgaaaccttcattttggacctcaaaaccggacgcctacccgccgacagtatgcagctgtacacataccggtacatgctcaaccaacacggcaacgatgtgacaaaaggcatgttttggacgccagccaccaccaagggagacgagcaatcagtcgagcagggaacggccaccgaactctacgaccttgacaacaacacctaccggcatgtatcatccatgtatagtcaagcaatgaaaggaatcagccaaggcatcttcgtaccccacgtcacagcactctgcaaaggctgccccgtccgagactcatgctgggcctacggcggcccgcaagcctaccggtatcccaccacaaccatcacccagccacaacatagcaaagaagataaggagcaccagtgaacgacaacacagacgacgaccgatacactgtcaccctcaaatacggcggcgactacgccgcaccctggaccgtcattaggggagacaccgccaaccaggtgaaacaggccatcatcgacctgctaggcgggctcaaagacaacaccatctccgaggattgggacctagccaccctggtagcaagcgcatccatcatcctccaagaccgatacaaccaggccgccaaagactacgtcgacaacatcgcatccaacgaaaacagcatcatcatcgaccagatcaacaaagccactagcaaggcacagctagccgacctcctcaaacagtacaagaagaccatcacgagcaacagtgacgtgtccgaagccttccggaacaagcgaaacagcctcacccgataaaaaccgacacaaaccaacaaaaagaaacaaatacaaacagtaaaggaaacactaatgggactcgccaactaccgcaacaacagcaacagcaccttcttcaacccctcccgaaaccaggacgccaccgccatcgccttcaaagtccacgacgtagaacacaacaccgaaggctacggcggacagaccgcagaccgcatctacgctgatgtcaccatcttccacaccctagacgacctcaacaacagcaccccagaaaccatccccaacgccattatcgaaaaagtgcgagacagcaacgaccgcccacactccatgatccgcgatctagaagcctatcttggcgaggagcaggccttcaaactcgccaccgtacgcaccaaaaacggcttcaacgcggtaatcctcaaaccccttgatgacgccatctacgataaggttgccgaatacgtagacaagcgcgacaccggccagctagacgacaccacagcctcaactgatgctgacatcgatatcgactccatctgaccaccaacacacatccaaccgatagatagataaggtcccgatgctctctctccaaagatccttcgagagagcctcccaaaccgcagccgagctgccccgcataccccaactagcacccttgtatgacaatctggacatgcacattcacaaaggggatctcgtcatgatcgcggggcggtccggcagccaaaaatcagggctagccatgttcatcaccgccatgctcaaccagcccgccctctacatatcaggggacatgacaccctgggaggcctccacacgaatcatctcactcaacacccaacacaccacccaacagatacaacacaacatcgacaactacgggccagaatactatcgagacagcatccaccacggcgcgcacatcacattctcactccagtcacccatcacatggaccgacatcaccatggaactgcaagcctacatggaaatgtggaacaccttcccaccactcattgttatcgacaacctcatggacatccaagactgcgaatccgactaccaggcacagcaagaagccttgcaatggatcacagcattaggccgcgacaccggatccaccatcatcgtcacccaccacgcaaccgacaaaaccggaaccgacatcgaacaccccccagcacggcgggaaatcaaaaacggcctctccgaaaaaccacaactcatattgggagtctccttttatggtggcgaagataacggcaacgggctcaccatccccgccgaggcacgcatcgccgtcctgaaacaacgcaccggcaaatccagcccagacggaacaaaatatgagcgactcagagcctaccccgaatacacattcttcgggccactcgcctaaaaacagccatggaacatgaccacaacacacaaaggactaccatgtcaacacaacaggcacgcaaccggcgggccggagccgaatgggaaacacgactcctacaccagctacgcgacaccggccatgatatagaacgcctccacctcaacggtaaagaggacgaaggcgacctcatcctcacaaccagcaaccacacctatgtgatcgaagcgagagccggccagccacacctcgccgaattcgtgaaacaagccagccgggaggcacgcatctatgaaacccaccgaaaccgcgaaaaccagtccgccatcggactcgtagtgatgaaacagcgcaacaaaccctggagcgaagcctatgtggtatcaaccctcaacgagctcctcctacacctctgacacctgccgcctcctcaacacctaccagatacggtacaacccatccaagaacgagcaacacatcctctgcccgttccacgacgaccaccagccctccatgagcatcaacctcgacaagggcgtctggtactgccacacatgcggtgtcggaggcggacttgccaagctacaacaacgattagaagaagaaaacccgaatgtacgacagtatacgcccatacaacattgcggaacgccgccgaatccagaaagcctcggccctctacgaaacccacctcgaaaacatactcgacctgctctcagcaagaggcatcagcgaagaaacagcccggctccaccaccttggatacatcgacaatgaccccatcccaggccacgaggactacaaccagtgcatcaccatcccatacatgtaccccgtctggggggagccagccgaaatacgaaaaatgcgtttccgctgctcactcccgcacgactgcaaaacccacaaccaccccaaatatctaaccccggcaggagacacaggctccatctacaacatggccgccatggccaacccggcatccgaaatgcacatttgcgaaggcgaattcgactccatgatcctcgaacaatgcggatggccggccgtagccctacccggggccacctcgtggcaaaacttttggaccaaattttttgaaggctacgaccacatctacatctggtcagaccccgacaaagcaggagaccagatggcccaaaccctccaggcagcactcccccaagccgtacatgtgcccctcactgtcggggatgtcacagacacctacctgcaggccggaaaaacagggttgacacaagcactagacactgtgctacagtaaaaccacacaagcaacccaaaccaagaaaggcatataaaacatcatggatcccctcgacacgtgccccatccctaaccggcgcaacaccagccaagccgccaggaggcgtatccgcctcgccatctgtgcagaaaaatgggctgaaggtgaagacccactacatatcatgcacacctggggcaccacctatgatgggatgcgatccatgatccgcgccaaccccgacaataggctacccaaagacatggccaaacgtttgcacaaagtatgccgggaagcctacccccaaaaccagcccaacaggcaccgaagcggatgggaccaatacgaaaaagactattacacggaggaaatactcttcctcaactccttcaacgtgccagccatcgagatccttaaccggctcgacgtgtcatggaccatgtggaaacacatcatcaacgaacaacacctgacacgtttacagcaggaaaccgacaacgcctgccaatgggcgaacctgcgagaacagcaccccgacaaaacggatcaggaaatcacccagatgatgtacagtaaccaagcaacgttcagcacggtgatgaaaaccatacccgcataaacatccatgacaccagcatagtatttgcacactctttcacatataggagacatgatggctactaaaacccaacacttgatcgacatgtacggggacaacaacggcaggtttcccgaacacctacatgacgtcatatgcggccgtgccatcatccacaacaccggcgaagtctcatggtgcacacgcaaaccaggacacgacggcgactgccgcacaggatggcagcccaccacacaacccctaggacaccatggcaaccaaaactgaaaccctcatccaacgctacggtgataaggctgccgacgtgctcgccgacaggtccatccccgccacacagctagcccaaatgctcactgaagccggataccccatctccgccaccgttatcaaagactatcgccgcaaacaagccaacaccaccccacgagaggaggatacccgatgatagacaatatagaccggctactcacacagctagccaaccacgacaacgccatcgacaccatcgacgacaatctagccaacggcaccgtgcgccgcacacgcatctccgaatggaccttgccgaacggagaaacaggccgatccatacaaaaaatcatcgaccaccaaccagcaaccaacccctaccctgtagacgaactcgttgataaactagccgaatggacacccccaaaacccgaacaagacacccgcaccgactacagcactgcggccttcgtcatcggggcgggagacttccaaatcggcaaaggcatccccggaggagaaacagcacacttcgccgacgactacctgcgctcactggcagccgcaaaacactactggcagcaagcaggacagccgcaacgagtccacatcgcattcctcggcgacatgatcgaaggatacgtgtcacaaggcggcaacaacgcctggcgcacacaaacacccttgacggaacaaatcaggctcacccgcatggccatgatgcaactcatccacatgttcgaccactgccccaacgtcaccatcacatccatccccggcaaccacggagaagccgtacgcttcggaaaaggagtcaccacctacgacgactccttcgacgtggactgctgccgcgccatcgcagaagcctaccaactcaccaaccaataccccaacctccacttccacttccccagccgagacgaaatgaccaccaccgtcgatgtggcaggcacacggatactgcacgcccacgggcaccaatggcgcgccggcaaacagtacgaatggtggcgcggccaagaattccacaacggcaccacatcccacatcctcatggccgggcgccggcaccacctagaaatctccgagcaaggacaccgcaccttcatccaatgcccatccatggaaggagaatccgtctggtaccggcaccgcacaggcacaaccggccaccccggactcgtgtgctacactatcaacaacaaaacaccaaacaactaccagatagcaaggtaatagtgccatgagcagacgaccaaccaaaacagacctagccaccaccgcatcgtgggtgtgggccacagaccatcaccttcgcacactcaaccgggcatgcaccaaaacagccggacactaccccgcaatcagcgcagacgacctctaccaagactccctactatatattgcggtgcgggaacaataccacaacctagacaacaaacactacaccaaaatgtgctacagggtagccaaacggctagccaacaaaaccacacaacatttaggccagccgaaacctttacccgatatcattcatctagccgacaactaaaccagcatctgaaaggggagaacacacaccatggtcacaaccatcctcgacgacggcacccaaaccaccaggctacaaacagtaggctccaccaccaccgccatcatcaccaacaccgaaacacccgaaaccatcaccgccaaatacaccatcagtaaagacggcacagccacctacagcatcagcggaaacacctatttgggagaccaccaacacattatcaaactcatgtacgactactgccactgcgtcggacgattcgacaccaccaacaccagcaaccaagacaacctcgacaacctattcaggggatgacacatgaaccggacctacaccacagccgacatcatccaagccgcgcaatggatctggaacggaggcccatggaaaccctccgtcgaaccaggcatgccacccccaccaaccgcgccacaacaccacggcaacaacatcgtcaccatgatcgacctacaattagcgatagacgactacaccctcacatgtgaaccatccaaacagcgcaaacggctagcccgcctggcagccttccgtgaagtatacgggtatgatcaaacctacgccacagctgcacagcgactcggagtgacaagacagactgtgaaacaatgggcagaccaaacactcatcaccctcaccgagtacgcaaacagcacatactacatgccagacgataacgaaggaatggcataacaaccatgaacaacacaaccaatatcccctacactgccctcaaaacagcggtacaccgaatcgtccaacaacagcccaccaacatgcagcaattggaaaacattgttgacggtgtcgaaaaccagtaccgtgtaccaatctccctcgacaacgtgaaccttaccgtcaaagaagtcagcctcgacaaccttgctatcgaccaggacacgctagacgagtgtagcgaaatcctatggtactgcgacagtgcaggacaccccacaaacaacagcaacacccgtgacaacagcgaggaccagagcccctatgcaagccaggaagcactagactggctcgccggaatagcataccaggcaaaactattgcaagcggaagccgacgagatcatgtgggctatcatccgccaccgcaacaaccacaaaaacgttatcggccggaacgttctcgaccaggccaacgatactatctccgcctgcctccacctgcaccagatgctcgaagacaccatcgacagcaacgaatcatagccacaccgcataaacagaaatagtgccccagcggcaaccaccacacgatcgtggcagcaccgctggggcacacatctatgttcacttatgcaacagtagactctaccgtgccaacctcagactcggctgcacgcctcggaacatagccggcaacatccgcatcatcaatcggctcaatcataccaggatccgacacatccaccgagtgcggctcaaccaagcccccatcgtcgggtagaacaagcccagcatccacaggcgtggttttaggtttgccggcaacaaacgacgggttaccaaacgaggtagcaatcgacagcaccgcagccaccgttgctgttatcagcgcagactcccacggcaaaccgcgaaacgactccgcagtataggtgacacccgccgtcacacccaacacagcaacaaacgtttgaataaaagtcttcaacgccctttcgagcaggcctaaccaaaactgtttacccacaacaaaccaccatcactttttcaaaccgttaacagcagactcgagcctgtcaatacggctacgacactccaacacgtaataccagacactccacagggcatccttagtgcgccacagcttccccgtcaccggattcttcacccacgacaaggcatcaacacgcttacccaaatcaccattctgaacctgaaccacaccaacatcgtgatgcagctggttcaccgactgggccacctgtgccgacaactgtttaatctgattatgtaacgcttgtacatcagccatactcaactcctcactacttgaaccgccgccgtggccattcaccacagccataaatttgtcccacggaaaccacggccccggatcgtcatgatccgactgatgccacgcatccgtcacatcagtgtgcccgcagatgccccgcctacccgctttcagatcggccacagacagtttcctcttcgggacaccatgcttgtcacacaactgccgacacaggatagcggcacgctccaccgcaggccacacacgaggatcaagccactgctcccgagtgtaagcatgccctggcacacggaacgaggcgtgcgaacccccatccgcgcaaatctctatacccaatgaatgcggattcggcagggcatgccacccaatcgtagactccgacaagcactgcaccgtctccccaacatcacacacataatgggcagaaccacccgacgatggggaagcaaaatagttcgccgtcgacaccgcccgccctttacgcgaggcagacggaaaacccacatccgggcacgtcgcatgaatcacaaccctattcaccggactattagaaccagccgagtgatgcgccgcaggaataaacctcaccacacaccaccaccaaacactaccaacatcagtaacacccttcctctctcacttgcggggatgacacggtaaccacaggtgatggtttcacactctcgcaggccaccgaacccgatatcgtggacgccacaccgtcactatatttcacaaacaggcggcccccggaacagtacacagacaccaccgaacgcccatctttaccatctttaccgtctttaccatcggatccgttcgcaccggcggggccgcgcccaccccgttcaccctgtgcaccttgcgggccggcaggacctgaagggcccacatcgccgcgctcaccagccgaaccatcacgaccatccttgccatcagcgccgttcacaccgtccacgcctgcacggcccgaaacaccatcacggccatccgaaccgttagcgccgggcagcccgtcaggacctttcacaccattcaaacccggggaaccctgcggaccaacagggccaaccagcccagccgaaccattaacaccatcccggccattcgcaccggcggggccttgcgggccgcgctcaccggccgggcccggcacaccctgcacactccgctcaacacgcacagcatccacacacaagccagactggtgaagccgcgcagactccaccccacccgaagtacacgcctgcttcacacgggcagctaaaccccgagccgccgtaccattagactgggccctcgcctgctccgaatccctttgcgaagccacagacccgtatcgcaaagcacccccggcgaccaccgccagtagtacaagcgacaagaacaacaatataagtgaagccttctcaaacgagcggcgctgccgcttctcttcctccaactccctcacaattcaccccccaccaccatcaacagtatccttcaaaaactcgggcaaatcaggcatctttaccggctcaacattctccggcagattcgcgttatagcggtgaacagtatggcgaatattccacgtgtattcttccatcgcatcaacctgcgcagacaactgcctcagcctcttcttcgacctgtacgtagccgcctgaatcgaaccaagaacagtagcgatagcggtacaaagagaggctacgagtgtgggtgaaagccatgacactacagccccctaccactacaaccaccacaacacgtcacatacccgcaagccgcacattacacgccgacagcaatccaattagccaccgcaggcacatccttcggcttagacccgtcattcgtaataaacgccaactgaaaatccttgctagtaatattgtaggctttcacatcaatctgctgcgtaccaccagccgccgtagacatagacgccacaacaacaggcgcactaccaaacgggcggccaaacgggatcgtgtaagcatacacagcagacccgccaaactggatagacttagtgcccgtttcgatcctgggggacaacagcatccactcgccggcatggttagcccacaccgcccccgaaggaaccatcacccggtcaccctccacaggggtaggatcacacgcagcagactccccaaacgccacacgggccgccacagcacgcctatccaactgctgctgcaacccgttagacgacaccaccaaagtcgccaaccgttgctgatgatacacgccaggctccgcacgcaacacatcacgggcacgctccgcacgccccccaggaacaatctccaactttgccgtattcgcctcccaatcccgagacaacaccacatagtcgtatcgcgtctcaccaggacccggcagctgccctgtcaccgtctcaacactattcgacctgcacatcaccccgtgagcccaagcctgccccggcaacacctcacacaacactgtggcaccctgaatcgtcgtaccgacacgaaaatcgtcaggccccttcaccgaaggcatattacccatcagaccagacatttgagcccaatcatactcggtcaacacaccatcaaaccctttacacacaatacccacaacacacccctcacaattagaacttttgcaaatcccgcacacccgcagccaaaccagccacacgccgcgccaacaacgccgacggattatcctcataatcccccgcaacaggagtcaccttcgtccacccgtcaccaggcgatacacactccacatcaatctgccgcacaatctccgcaatagggcccgaacccacatcatcatagatcaggtcacctggcatcagattgcctggcccaaaacgcaacacatccgactccgccaactcgatcttaaaccccgacgtagcccccgactcctgcaacacccgctccgcctcatcaataagatgcacatgttcagaatccgtgttacgggcatccttaaacacctctacacgatcaaaccactcatcctcggccatcgaatcaacatcctcacaaaacagccgatccttaccctcgccgcggccaccaaccaccaccgaagtagccttcggggcgtcacgcacatactcccacgacacaatcgaacccgactcggcggtcaacacatggctacgtgtcacagcaggcacacaatcaaacagcaaaccacgctgatcaaacttcgcattctcaaactggttcaccgtgacagtcatccgagcccacgacaacaccggcaacaacttatcagcaaacacgtgaaaccgcacctgaaaatccttaatatagcgtccacgacgctcatcatcgttcataaacaaaccaggcggaaaacgccaagcattatcccccaacacctgcttagccaccgactccgcagcaccagaatagtgagcataatccctgtcggcacgccactccataccaaccaaaccaggacgataattcacaggccacatcaacatgcgccacaacaggcggatatcatcctcacacgtgatagtcacccgcgaagaacgccaaggacccacaccatgaaccttacgcacaggcccagaaaaaatctggccaccaccataatcaacaaccagccgtgcacccggcctagtcaacccgtcaagcctagaatgatcacccgacaccaccaactccagcgtagacaaaccattccacttcaacgacaacttcaacgactcaaaaaaattgataggcgccacacgatgataatccggcgtaaacaatgttacattcggaacaagaccagccatcaactattcaccaagcccttaaaaacctgtactgcacctacacaacaatggcacccaaaccaaccatctcaatattcacactcttcgaaccgccaggcggaataggcgcaaactcccactctgtcaaacgatccatcacatcctcaaacccattcaacaacgcagactgtttacgaggatccgtgtcaatagtgatccaatcatactcctcgacaggccaatcagaagacacacgcaaaccatcaatctgcacagaccacgactccaacggcccctcaacacgaatcacaggccacgcaggcacatcacccctgttagacaggttatcccaacccgaaccaacaccaggcgtcaacaccacaggaaacgccgtacccttcttaccgacagggccgccacccaaccaatcctgcaacttcgcgttactaaaacgaaacttttgctcatccccataccaaaacgggtcataagccgtcaaatgaatcacatagcgggcataacccctgttcaccggatcaaccgtaaacgtgtcatccaccgaatcaaaccggcacttcaacacacgctcacggccggcaggagtcttcaccgacaactctccctcctcgcccggaggaaaagcagaccacaacgcgtcataggctttcaaaaaaccgtcacgaaacccgcccaccggatcctcgtcgacacccgacaccagcaccggcagcgtcgcctcgcgaggcttcacattaaacccgcgccactccgagccgtgcaccccagcatgagtttgagaaaaatgctcaacctcaggaacacccaagccgcgcaacgaatcattcaacaacatcaccggagacgaccccgtataatccgtcaaatgaagcacacgctccggaccattaccaatcaacggcaacatagaccaggtcacagtcaaaccagaacgatcagacgggtcaggaagaaacatgaacaacacccccaatcacacgtaagccaaagcgttcaaagcgtcacgctgctgacgctcaatccgcttcgcaaactcggcaggatcaccatacgtcggtccgttaacattcaccacaacactcttctcgctcgcacgccgataccggtcgtacggggtaaacgagcccacagacgatcgcacaccaagctgggcatccacagcatccggcagctgcgaagcaacacccgacatagcatccaacgccaaaccagcattcccggtgatcccctcagccaaaccggcaacaacctgccggccaacctggtcacgaaacaccctcgacggggaatgaatacccagagcagacttcgcagcattcgcaatctgggaacccatattacgcaccgtatccaacaggccactcatagcattcttaataccattacccaaaccggcaacaacattatggccagcagacaccaacaaggaccccatactacccaaagcgccccgaatattgctgggcaaattccggaaaaaccctaacacactatgcacaccactagacacagcagaccccatagcatgcatagcagaagaagccacactacgggccccattaaacccgctagaggctgcaccacgaaccctagacgccatcgacccaaaaaacgagcccaccgcggacaccaccgaagacaccacactacgaatcccgttcatcgcagccgaaacagcgccacgggccgcgttaaaaccagacctcacatgggaggcaaccgaagaacccagccgggcaaaaaaccccacaacagcgttcacgccgccagaaacaatcgacttgaaaccattaataaacgcagacgtaaacgccctaatatgattccagccagcctgaaccaccgaacccatacgcgccaaaccagacaccaaatgggcaacaacccatgagacgacacgggcaacagcagcaatcacacgggccacagccgacacgacagcaccaacaatacgggcaacaaaccccaccacagccgccaccatcggagccaccacagcaagaatacgggccaccacctgtatcacaaccgcaacaacctgaaccaccacacgcataaccgccgcaatcacaggcatcaacgaccggatcaaaccaataacaggcggcagaacagacatgacagcacccaaaatctgctgaatcaccggcatcaaaacaggcaccaactgcatgaccacgccaacaacctgccgtatcacagcaacaacagcctgcaacaccggcatcaacgccggcaacaacatggcagcaacctgcgtcaccgcaccaataatctgcgtgatcacaggaaccagccgggccaccagcataccaatcacaggcatcaactgggcagccaaaccggcaaccatgccgataatctgggcaaacactggcgccaaccgtgccaccagccccgcaaccaaaccaaacagcggctgaagagcggccataatctggcccagggcttggccaaccacagccacaagctgcatcacagcggcacggaactgggcgttcgtagcaaacatggcagcaaacagcccgatcacaacaccgacagggccacccagggcacggaacacgccgccaagacccccggcggcacccttcaaagcaccaaacgatggtagcagattcttcaacgacaccgccaacggggcaaaccccgcaacaagcttcccaacacctgcagcaacaacaccgaacacggcggtgccgccagcaaacatggcagccaaattcactttaggaacaggcaaatgcattctcgcaaaaatgcccttcaactgctccaccttagcgcgcatctgtgcattcattcttgtgatcatagccggcatacggttaatccacgccaaaatagacggcatcatccgctgaatcccctgttccatctacgcaaacaaaggctttatag

SEQ ID NO: 68 - DNA, 17120 bp, Pahexavirus sp.
  source 1..17120: mol_type = genomic DNA
gctgatttttgggttgtcgtttgtggctgttattccccaggatgatgggtcggcgttggttcgtccgcagtcaccaaagaattgtacgggcaagttttcggctgacgggtctcgtctggatgctggccttgtggtgcagcagacgtgtgatcctgaggttgttgaggcggagttgttgttgcctgatgtgattgttcaggtggagcggcgtgggtctcgtgagtgggttgagacgggccgtataccgaatgtgcttggggcggttccgttggtgcctgttgtgaatcgtcgtcgtacttctaggattgatggccgttcggagattacgaggtctattagggcttacacggatgaggctgtgcgcacactgttggggcagtctgtgaatcgtgatttttatgcgtatcctcagcgttgggtgactggcgtgagtgcggatgagttttcgcagcctggctgggtcctgtcgatggcttctgtgtgggctgtggataaggatgatgacggtgacaccccgaatgtggggtcgtttcctgtgaattctcctacaccgtattcggatcagatgcggctgttggcgcagttgactgcgggtgaggctgcggttcctgaacgctatttcgggtttatcacgtctaacccgcctagtggggaggctttggctgctgaggagtctcggcttgtgaagcgtgccgagcggaggcagacgtcgtttggtcagggctggctgtcggttggtttcctggctgccagggcgcttgattcgagtgttgatgaggccgattcttttggtgatgttgggttgaggtggcgtggtgcttcgacgcctactcgggcggctacggctgatgctgtgacgaagcttgttggtgccggtattttgccggcggattctcgtacggtgttggagatgttggggcttgatgatgtgcaggttgaggctgtgatgcggcatcgtgctgagtcgtctgacccgttggctgcgctggctggggccatatcgcgtcaaactaacgaggtttgataggcgatggcttcgggggctatgtcgaggcttgctgcgactgagtatcagcggcaggcgattcgttttgccgggaaatacgctgggtattatgccgagttgggtcgtttgtggcattccgggaagatgagtgacacgcagtatgtgcgtttgtgtgtggagttggagcgtgccggccatgacggctcagcatcgttggctgccaggtttgtgtcggattttcgccggttgaatggtgtggatcctggtttgattgtgtatgacgagtttgatgctgcggcggctttggctaggtcgttttcgactatgaagactcttgagagtgacccggatagggcgaatgatacgattgatgcgatggctgcgggttttgatcgggctgttatgaatgctggtcgtgacacggttgagtggtcggcgggtgcgcagggcaggtcttggcgtcgggtgacggatggtgatccgtgtgctttttgtgccatgttggctacgaggtcggattatacgactaaggaaagggcgctcacgactggtcatactcggcgtcataagcgtggcggtaagcgtccgctgggttcgaagtatcatgatcattgtgggtgtacggtggttgaggttgttgggcgttgggagcccaatgctacggacacccagtatcagaggacgtatgagaaggctcgtgagtgggttgatgatcatgggttgcagcagtcgcctggcaatattttgaaggctatgcgtactgttggcggcatgagataatttgatgtggtttccggttgtgcgccgccggttatcggtgcacagggttgtctcccgcacgggggtcaacaatgttgtgttgttttccgcaaggagtgtagggttaggctatggccgatcaaaacagtgaaaaagaaaacatcaacaatgaagagaatgttgaatccggaaagggtaatggcattgttgatacagtaaaagacgatggcgggcaggaggtagccgacaatcagttgaagaatgaaggcgagggtaaaacgtatgggactgattggaaggctgaggctcgtaagtgggagtctcgtgctaaaagtaatttcgccgagttggagaagcttcgcgcctcggatagtgattcggggtctactattgatgagcttcgccgcaagaatgaggaactcgaagacaggatcaacgggtttgttcttgagggtgtgaagcgcgaggtggcttcagagtatggtttgtccagtgatgcgatcgctttcttgtcgggtggcgataaggagtcgcttgccgagtctgcggaagctttgaagggtttgatcgaccatagtagtggtggcgcgagtgtgcgccgtcttgcggggagtgcccccgttgatgatgttaaacgacgtgagggtgtcgcgcttgtggatgctcttgtcaataattctaggagatgatttctgatggctgacgattttctttctgcagggaagcttgagcttcctggttctatgattggtgcggttcgtgaccgtgctatcgattctggtgttttggcgaagctttcgccggagcagccgactatttttggccctgttaagggtgccgtgtttagtggtgttcctcgcgctaagattgttggtgagggtgaggttaagccttccgcgtctgttgatgtttcggcgtttactgcgcagcctatcaaggttgtgactcagcagcgtgtctcggacgagtttatgtgggctgacgccgattaccgcctgggtgttttgcaggatctgatttcgcctgctcttggtgcttcgattggtcgcgctgtcgatctgattgctttccacggtatcgatcctgctacgggtaagccggctgctgctgtcaaggtgtcgctggataagacgtcgaagacggttgatgctacggattctgctacgactgatcttgttaaggctgtccgtcttatcgctggtgctggtttgcaggttcctaacggggttgctttggatccggcgttctcgtttgccctgtctactgaggtgtatccgaaggggtctccgcttgccggccagcctatgtatcctgccgccgggtttgctggtttggataattggcgtggcttgaatgttggtgcttcttcgactgtttctggcgccccggagatgtcgcctgcctctggtgttaaggctattgtgggtgatttctctcgtgttcattggggtttccagcgtaacttcccgatcgaactgatcgagtatggtgacccggatcagactggtcgcgatttgaagggccataatgaggttatggttcgtgccgaggctgtgctgtatgtggctatcgagtcgcttgattcgtttgctattgtgaaggagaaggctgccccgaagcctaatccgccggctggtaactgatttattgttgcggtgatgttttctatgtgcagggggtggtgttgatgggtatcattttgaagcctgaggatattgagcctttcgctgatattcctagagagaagcttgaggcgatgattgccgatgtggaggctgtggctgtcagtgtcgccccctgtattgctagaccggatttcaaatacaaggatgccgctaaggcgatccttcgtagggctttgttgcgctggaatgataccggggtttctggtcaagtgcagtatgagtctgcgggtcctttcgctcagactacacggtctaatactcccacgaacttgttgtggccttccgagtttgccgcgttgaagaagctgtgtgagggtgatggtggggctggtaaagcgttcactatcacccccactattaatggtcgatatgcacattctgaggtgtgttccacggtgtggggtgagggttgctcgtgcgggtcgaatattaacggctacgctggccctttgtgggagatatgatatgaccagttttccttacggtgaaacggttgtgatgcttcaaccgactgttcgtgtcgatgatcttggtgacaaggttgaggattgggggcatcctgtagaaaccgtgcaccataacgtggccatctatgcttccgtttcacaggaggatgaggccgcggggcgtgactctgactatgagcattggtcgatgctgttcaagcagcctgttgttggtgccggttatcgttgccggtggcgtattcggggtgttgtgtgggaggctgacgggtctcctatggtgtggcatcacccgatgtccggttgggatgctggtacgcaggttaatgtgaagcgtaagaagggctgatgggttgtggctcaggatgtgaatgtgaagctgaacttgccgggtattcgtgaagtgttgaagtcttctggggtgcagtcgatgttggctgagcgtggcgagcgtgtcaagcgtgcagcctcggcgaatgtgggcggtaatgcttttgatagggcccagtatcgtgcagggttgtcgtcggaggtgcaggttcaccgtgttgaggctgtggcccgtataggcaccacctataagggtgggaagcgtattgaggcgaagcatggcacgctggccaggtcgattggggctgcgtcgtgatcgtttacggtgatccgcgtgtgtgggctaaacgtgtgctcaaggatgatggctggctgtccgatataccgtgtactgggacggtgcctgacgatttcggcggtgatctgatttggttggcgttggatggtggcccgcagttgcatgttcgtgagcgtgttttcttgcgggtgaatgtgttttctgatatgccggatcgtgctatgtcgttggcgcgtcgtgttgaggctgtgctggctgatggtgtggacggtgaccctgtggtgtactgtaggcgttctactggtcctgatttgctggttgatggtgcacgttttgatgtgtattcgctttttgagctgatatgcaggcctgccgaatctgagtaaacgttttgttttgatattgttgtttgttttttgtttgatattgttttttgggggttgtgatggctgcaacacgtaaagcgtctaatgttcgctctgctgttacgggtgacgtctatattggtaaagctcatgccggtgacactattgatggtgtgaagacggttcctgacggtcttaccgctttagggtatctgtctgatgacgggtttaagattaagcctgagcgtaaaacggatgatttgaaggcttggcagaatgcggatgttgttcgcactgtggctacggagtcgtctatcgagatttctttccagctgatcgagtctaagaagggggttatcgagctgttttggcagtcgaaggttactgccggatctgattcgggttcgttcgatatttctccgggtgccaccactggcgtgcacgctttactgatggatattgttgatggtgatcaggttattcgctactatttccctgaggttgagcttatcgatcgtgacgagattaagggtaagaatggcgaagtgtacgggtatggtgtgacgttgaaggcgtatcctgcccagattaataagaagggtgatgcggtgtcgggtcgggggtggatgaaggctttaaaagctgatactccgacgcctcctccttcgccgaagccggatcctaatccgccgtctgagaactgatacacgattttaggggatttttgatagatgagtgacacaggttacacgttgaagattggtgaccgtagctgggtgttggcggatgcggaggagacggctcaggctgttcctgcccgcgtgtttcgccgtgccgctaggattgcccagtcgggggagtctgcggatttcgcccaggttgaggtgatgttttctatgttggaggctgccaccccagctgacgcggtggaggccctggaggggcttcctatggttcgtgttgccgagattttccgtcaatggatggaatacaagcctgatcagaaagcggcctccctgggggaatagtttggctccacggcctgattgatgattatcgtggggccatcgaatacgatttccgcaccaagtttggtgtttctgtttatagtgttggtggcccgcagatgtgttggggtgaggctgtccggctggctggcgtgttgtgtaccgatacgtctagccagttggcggcccacctgaatggttggcagcgcccgtttgagtggtgcgagtgggctgtactggacatgctggatcattacaggtctgctaatagtgaggggcagccggagcctgtggcgaggcctacggatgagcgtagagcccggtttacgtctgggcaggtggacgatattttggcgcgtgttcgtgccggtggcggggtgtctcgcgagattaatattatggggtgaatagtgtatgtctggtgagattgcttctgcatatgtgtcgttgtatacgaagatgcccggccttaaaagtgatgttggtaaacagctttctggggtgatgcctgctgagggtcagcgttcgggtagtctttttgctaagggtatgaagttggcgcttggtggtgccgcaatggtgggtgccatcaatgttgccaagaagggcctcaagtctacctatgatgtgactattggtggcggtattgctagggcgatggctattgatgaggctcaggctaagttgactggtttgggtcatacgtcttctgatacgtcttcgattatgaattcggctattgaggctgtgactggtacgtcgtatgcgttgggggatgcggcgtctacggctgcggcgttgtctgcttcgggtgtgaagtctggcgggcagatgacggatgtgttgaagactgtcgccgatgtgtcttatatttcgggtaagtcgtttcaggatacgggcgctatttttacgtcggttatggcgcgcggtaagttgcagggcgatgacatgttgcagcttacgatggcgggtgttcctgtgctgtctttgcttgccaggcagacgggtaaaacgtctgctgaggtgtcgcagatggtgtcgaaggggcagattgattttgccacgtttgcggctgcgatgaagcttggtatgggtggtgctgcgcaggcgtctggtcagacgtttgagggcgctatgaagaatgttaagggcgccctgggttatcttggtgctacggctatggccccgtttcttaacgggttgcggcagatttttgttgcgttgaatccggttatcaagtcggtgacggattctgtgaagccgatgtttgcgtctgtggatcaggggattcagctgatgatgccgtctattttggcgtggattaaccgcatgccgggcatgatcacgagaatgaatgaacagatgcgcgccaaggtggagcagctgaagggcatttttgcaaggttgcatttgcctgtccctaaagtgaatttgggtgccatgtttgcgggtggcaccgcagtgtttggtattgttgctgcgggtgtcgggaagcttgttgcagggtctgccccgctggcggtggcgttgaagaatctactgccgtcttttggtgctttgaagggtgccgctggcgggcttggcggcgtgtttcgcgctctgggtggccctgtcgggattgtgatcggcttgtttgcggcaatgtttgctacgaacgcccagtttcgtggcgcggttatgcagcttgtgggggttgttggtcaggctttggggcagatcatggccgctgtgcagccactgtttggtttagttgctgggctggtggcccagttggctcccgtttttggccagattatcggtttggtggctggtttggcggctcagcttgtgcctgtgattggtatgctggtggcacggctggtgcctgtgatcacccagattattggtgcggtgacgcaggttgctgcaatgttgttgccggcgttgatgccggttattcaggctgttgttgctgtgatacggcaggttgttggtgttgtgtcgcagttggtgccggtgttgatgcctgtgattcagcagattttgggtgctgtgatgtctgttctgccgcctgttattggtttgatccggtcgttgatgcctgtgattgcggcggttatgcgtgtggtggttcaggttgttgcggttgtgatacaggtggtggcccgtattcttgctgtggtggctccgatggtggcggctgtggtggggtttgttgcccgtattgttggtgctgtcgtgtcggctgtggcccgtgtgattgctgctgttgcccgtgtcgtcacatgggttgtggcccatttggtgtctggtgtggcgcatatgggttcggctatactgaatggctggaatcgtattagggcgtttacgtcttcgtttatgggcgggtttaagtcgatcatttctgccggtgttgccgctgttgtggggttttttacgcggcttggtttgtcggttgcttcccatgtgaggtcggggtttaacgcggcccgtggcgctgtttcggctgcgatgaacgggattcgtagtgtggtgtcatcggtggtgtccgcggtgggctcgttttttgggtcgatggcgtctagggttcgtggtgcagcctctagcgggtttaatggggcccgtagtgtggcttcttctgctatgcatgctatggggtctgctgtgtctagtggtgtgcatagtgtgttagggtttttccggaatttgcccagcaatattcggggcgccttgggtagtatggggtctttgttggtgtctgctggccgtgatgtggtggccggtttgggtaacggtatccggaatgctttgagtggcctgttggatactgcgcgtaatatgggttctcaggttgctaatgcggcgaagtcggtgttgggtattcattccccgtcgagggtgtttcgtgaccaggttggccgccaggttgttgccggtttggctgaggggatcaccgggaatgctggtttggcgttggatgctatgtctggtgtggctggacggctgccggatgctgtggatgcccggtttggtgtgcgatcgtcggtaggctcgtttaccccgtatggcaggtatcagcgtatgaatgataagagtgttgtggtgaatgtgaacggacccacgtatggggatccgaacgagtttgcgaagcggattgagcggcagcagcgtgacgctttgaatgcgttggcttacatgtgataggggggtgttgttcatgtttattcctgacccgtctgatcgttctggtttgactgttacctggtttatggatccgctgtacggtgaggagcgtgtgcttcatttgatggattatacggggtcgtctcctgtcatgttgttgaatgattcgttgcgcggcttgggtgttcctgaggttgggcatttttctcaaactcatgttggggtgcacggctcggagtggcgcgggtttaatgtgaagcctcgcgaggtgactctgccggttttggtgtcgggtgttgacccggatccggatggcgggtttcgtgacggttttttgaaggcgtatgacgagttgtggtctgcgtttcctcctgccgaggagggggagttgtcggtgaagactcctgccggtgttgagcgtgtgttgaagtgcaggtttgattcggctgatgacacgtttacggtggatctggtgaatcgtggctatgcgcgttatgtgcttcatttcacagcttatgacccgttttggtatggggatgagcaaaagtttcgttttagtaacgcgaagttgcaggattggctgggtggcggtcctgtcggcaagaagggtacagcgtttcctgtggtgttgacgcctggtgttggttcgggctgggataacctgtcgaataagggtgatgtgcctgtgtggcctgtgattcgtgttgaggggcctttggagtcgtggtctgtgcagattgatggtttgcgggtgtcttcggattatccggtggaggagggtgagtggatcacgattgatacggatcctcggcagcagtctgcgctactggatgggtttgaggatgtgatggatcgtttgacggagtgggagtttgcgtcgattccgccgggtggttcgaagagtgtgagtattgagatggttggtttgggtgccattgttgtgtcggtgcagtacaggtttttgagggcttggtgaatagttgatggctggtcttgttccgcatgtaacattgtttacgccggattatcatcgtgtggcgcctatcaatttttttgagtcgttgaagttgtcgttgaagtggaatggtttgtctacgctggagttggtggtgtcgggtgatcattctagtcttgacgggttgattaggccgggtgcacggctggttgttgattatggtggtggccagattttttctgggcctgtgcgtcgggtacatggtgtgggcccgtggcgttcttcgcgggtgactatcacgtgtgaggatgatattcgcctgttgtggcgtatgctgatgtggcctgtgaattatcgtcctggtttggttggtatggagtggcgtgccgacagggattatgcccactattctggtgctgcggagtcggtggctaagcaggtgttgggggataatgcttggcgttttccgcctggtttgtttatgaacgatgatgagagtcgtggccgctatattaaggattttcaggcccggttccacttgtttgccgataaattgttgccggtgttgtcgtgggctcggatgactgtcacggtgaaccagtttgagaatgtgaagtttgatcagcgtggtttgctgtttgattgtgtgcctgctgtgactcgtgagcatgtgttgactgccgagtcgggttcgattgtgtcgtgggagtatgtgcgtgacgccccgaaggcgacttcggtggttgttggtggccgcggtgagggtacggatcggctgttttgtgaggatgttgattcgatggccgagggggattggtgggatcgggttgaggtgtttaaggatgcccgtaacactgattctgagaaggtgtctctcttcgatgaggctgagcgggtgttgggggagttgcaggcttcgtcggggtttaagatcgagttggccgagtcggatgtgttgcggtttgggcccggcaatctgatgcccggggatttgatctatgtggatgtgggctcgggccctattgcggagattgttcggcagattgatgtggagtgtgattcgcctggggatggttggacgaaggtgactccgatcgctggggattatgaggataatccgtcggcgttgttggctcgccgtgtggttggtttggctgcgggtgtgcgggatttgcaaaaattttagtaagtgattggggtttgttgtgggtattgtgtgtaaagggtttgatggtgtgttaaccgagtatgattgggctcaaatgtctggtctgaggggtaatatgccgtccgtgaaaggcccggacgattttcgtgtcggcacgacgattcagggttccacggtgttgtgtgaggtcctgccggggcaggcttgggctcacggggtgatgtgcacgtcgaatgctgttgagacggtgacaggtcagcttccgggcccgggtgagacccgctacgactatgttgtcctgtcgcgggattgggagcagaatacggccaagttggagattgttcccggggggcgtgcggagcgtgcccgtgacgtgttgcgtgcggagcctggcgtgttccatcagcagttgttggcgactttggtgttgttgtctaacgggttgcagcagcagttggataggcgtgctgtggcggctagggtggcgtttggggagtctgctgcgtgtgatcctacccctgtggagggtgatcgtgtgatggtgctttcgggggctgtgtgggctaaccatgccggcgagtggatgttactgtctcccaggattgagacgggcactaagcagatacagtttggcgggtctgctgtgtatgcttacacgatcccgtttgagcggccgtttagtagtgcgcctgttgtggtggggtctatggctacggcggctgggggtacgacacagattgatgtgaaagcctacaattttactaataaggattttcagttggcgtttattacgaatgacgggtctaagccgaatggtgtgcctgcggttgctaactggattgctgtcggcgtgtaatgcgcggcttgcgggtatgtgacatgttgtggtggttgtagtggtagggggctgtagtgtcatggtttacacccacactcgtagcctctatttgtaccgctatcgctactgtccttggttcgattcaggcggttacttacaggtcgaagaagaggcttaggcagttgtctgcgccggttgatgcgatggaagaatacacatggaatattcgccatattgttcattgctataacgcgaatttgcctgagaatgttgagcctgtaaaaatgcctgatttgcccgagtttttgaaagatactgttgatggtggtggggggtgaattgtgagggagttggaggaggagaagcggcagcgccgctcgtttgagaaggcttccctgatactgtcgtttttgtcgcttgtgctactggcggttgttgctgcgggtgctttgcgtttcggtgctgtggcttcccaaagggattcggagcaggcgagggcccagtcgaatggtacagcggctctgggtttagccagccgtgtgaaacgggtgtgtgcttcgggtggggtggaatctgtgaagctgcacaggtctggtttgtgtgtggatgctacgcgtattgagcggagtgtgcagggtgtgccgggtcctgccggtgagcgcggcccgcaaggccccgccggggttgacggcagggatggtcgggatggttcggctgggctggttggccctgttggtccgcaaggttccccgggtttgaatggtgtgaaaggtcctgacgggttgcctggcgcgaatggatcagacagccgtgatggtgttccgggtcgtgcaggtgctgatggtgtgaacggcgttgacggcgctgatggtcgggatggttcggtcggtgggcgcggcgacgtggggccttcgggtcctgccggcccgcaaggcgcgcagggtgaacggggtgagcgtggccccgctggtgtgaacggatccgacggtaaagacggtaaagatgggcgctcggtggtgtctgtgtactgttccgggggcagcctggttgtgaaatatagtggcggtgtggtttccacggtgtcgggctcggtggcctgccagggtgtgaaaccgtcgcctatagtgactatatcatccctcaaatagaaaggagtggctgtgatggtagtgtttggtggtggtgtgtggtgagatacattcctgcagcgcatcactctgccggttctaatcatccggtgaatagggttgtgattcatgcgacgtgcccggatgtgggttttccgtctgcctcgcgtaaagggcgggcggtgtcgacggcgaactattttgcttccccattgtctggtggttcggcgcattatgtgtgtgatgtgggggagacggtgcagtgcctgtcggagtctacgattgggtggcatgccccgccgaatccgcatagtttgggtatagagatttgcgcggatggcggctcgcacgcctcattccgggtgccagggcatgcttgcactcgggagcagtggcttgaccctcgcgtgtggcctgccgtagagaaggccgccatcctgtgtagacgtttatgtgacaaatataatgttccaaagaggaagcttagcgtagccgatttgaaggccggcaggcggggtgtttgcggccacgtggatgtgacggatgcgtggcaccagtcggatcacgatgatccggggccgtggtttccgtgggacaaatttatggccgtagtctgcggcaatgatagtggtagtgaggagttaactgtggctgatgtgaaagccttgcatgatcagattaaacaattgtctgcccagcttactggttcggtgaataagctgcatcatgatgtgggtgtggttcaggttcagaatggtgatttgggtaagcgtgttgatgccttgtcgtgggtgaagaatccggtgacggggaagctgtggcgcactaaggatgccctgtggagtgtctggtattacgagttggagtgtcgtagccgtattgacaggctcgagtctgctgtaaacggtttgaaaaagtgatggtggtttgttgtgggtaaacagttttggttaggttaactggagcgggcggctaagacttttgtgcaaacgtttgttgctgtgttgggggtgactgcgggtgtcacgtatactgcggagtcgtttcgcggtttgccgtgggagtcggccctgatcacagccggggttgctgcggtgctgtcggttgctacatcgtttggtagcccgtcgtttgtggctggcaaacctaaaaccacggttgtggatgcgggtttggttccaccggatgatgggggcttggttgagcctcacatggttgatgtgtcggatcctggcatgatcgagcctgtagatgatgcggatcttggtgtaggctatgtgccgaaacatgctgccgagtcggaggttgggacggtagagtctactgttgcataagtgaatatatgtgtgtgccccagcggtgctgccacgattgtgtggtggttgctgctggggcactatttttgtgtctacaggagttttacaggttgtcgtctagtgtgtcttcgatcagctggtccaggtggaggcaggcggagatagtatcgttggcctggtgcagaacgttctggccgataacatttttataattgtcgcggtggcagatgatagactgcatgatatcgtcggcttccgcttgcaatagtttggcctggtatgcgattccggcgagccaatctatggcttcctggcttgcccgtgtgtcgtctggaatgccacgggtgttgctgttgtttgggtgtcctgcactgtcgcagtcccacaggatttcgctgcactcgtctagcgtgtcctggtcgatagcgagatcgtcgaggctgacttctttgacggtaaggttcacgttgtcgagtgagatgggtacatggtactttttttcttcactgtcaacaatgttttctagctggttcatgttggtgggctgttgttggatgattcggtgtaccgctgttttgagggcggtgtagagggtattggttgtggtatcgatcatcgtgttatgctattccttcgttatcgtctggcatgtagtatgtgctgtttgcgtagcctgttagggtgatgagtgtttggtctgcccactgtttcacggtttgccgggtgacacctaatcgttgggcggctgtggcgtaggtttggtcgtatccgtagacttcccggaatgctgccagcctagctaaatgttttcgctgtttggatggttcacaggtgagtgtgtagtcgccgatggctagctgtagatcgatcatggtgacaatgttgttgccgtggtgttgtggcgcggttggtgggggtggcattcctggttcgactgatggtttccatgggcctccgttccagatccattgggcggcttggatgatgtcggcggtggtgtaggttcggttcactggtcatcccctgaacatgttgtcgaggttgtctgggttgctggtggtggtgtcgaatcgtccgacgcagtggcagtagtcgtacatgagtttgataatgtgttggtggtctcccaaataggtgtttccgctgatgctgtaggtggctgtgccgtctttgctgatggtgtatttggcggtgatggtttcgggtgtttcggtgttggtgatgatggcggtggtggtggagcctactgtttgtagcacggtggtttgggttccgtcgtcgatggtggttttaaccatggtgtgtgttctcccctttcagttgctggtttggttgtcggctagatgaatgatatcgggtaagggtttcggctggtctaggtgttgtatggttttgttggctagccgtttggctaccctgtagcacattttggtgtagtgtttgttgtctaggttgtggtattgttcccacaccgcaatatatagtagggagtcttggtagaggtcgtctgcactgattgcggggtagtgtgcggctgttttggtgcatgcccggttgagtgtgcggagatgatggtctgtggcccaaacccacgatgcggtggtggccaggtctgctttggttggtcgtcggctcatggcatctctttcatcggcctatctggtagttgtttggtgttttgttgttgatagtgtagcacactagtccggggtttccggtggtgccagtcttgtgccggtaccatgtggattcgccttccatggagggtcattggatgaaggtgcgttgtccttgctcggagatttctaggtggtgcaggtgccaggccatgaggatgtgggatgtggtgccgttgtggaattcttggccgcgccaccattcgtagtgttggttgttgcgccattggtgtccgtgggcgtgcaggatttgtgtaccggccacatcaacggtggtggtcatttcgtctcggctggagaagtggaagtgaaggttggggtattggttgttgagctggtaggcttctgcgatggcccggcagcagtccacatcgaaactatcgtcgtaggtggtgactcctttaccgaagcgcacggcttctccgtggttgccggggatggatgtgacggtcacattttggcagtggtcgtattggtggatgagttgcatcatggccatgcgggtgagcctgatttgttccgtcaagggtgtttgtgtgcgccaggcgttgttgccgccttgtgacacgtatccttcgatcatgtcgccgaggaaggcgatgtggactcgttgcggtttgcctgcttgctgccagtagtgtttggctgaggcgagggagcgcaggtagtcgtctgcgaatcggctggtttctccgccggggatgcctttgccgatttgaaagtctcctgccccgatgacgaaggccgtatcgttgctaccggtagtgtcggcctgttttgggggtgtccattcggctagtttgttgacgagttcgtctaccgggtaggggtcggttgcgggttggtggtcgatgattttttgtatggatcggcctgtttcaccgttgggtagggtccattcggagatgcgtgtgcggcgtacggtaccgtttgcgagatcatcattaatggtgtcgatggcgtt

SEQ ID NO: 69 - DNA, 10693 bp, Pahexavirus sp.
  source 1..10693: mol_type = genomic DNA
gagtagggttgagggagttggaggaagaaaaaaggcagcgccgcaattttgagaaggcttccctgatactgttgtttttgtcgcttgtactgttggcggtggttgccgggggtgctttacgtttcggtgctgtggcttcgcaaagggattcggagcaggctaaagcccagtctaatggtacggctgccaagggtttggctgcccgtgtgcggcaggtgtgtgcttctggcgggcaggagtctgtgcggcttcaccagtctggtttgtgtgtggatgctcagcgtgttgagcggagtgtgcagggtgttccgggtccggctggtgtacgtggcccgcagggcccgcaggggccggctggtgttgatggttcggctgggctggttggccctgttggtccgcagggttccccgggtttgaatggtgtgaagggtcctgacgggctgcccggcgctaacggttcggatggccgtgatggtgtttcgggccgtgcaggtgctgatggtgtgaacggagttgacggcgctgatggtcgtgatggttcggctggtgagcccggtgatgtggggccttctggtcctgccggcccgcaaggtgcacagggggagcggggtgagcgtggccccgcaggtgtgaacggatccgatggtaaagacggtaaggatggcgctgatgggcgctctgtggtgtctgtgtactgttccgggggccgcctggctgtgaaatacagtgacggtacggcgtccaccatatcgggttcggtggcttgtgagagtgtggccccgtcaccggtggttaccgtgtcatcccgcaagtgagagaggaagggtgttactgatgttgatggtgtttgggggtggtgtgtggtgagatacattcctgcagcgcatcactcggccggttcgaatagtccggtgaaccgggttgtgattcatgcaacatgcccggatgtggggtttccgtccgcctcgcgtaaaggacgggcggtgtccacggcaaactattttgcttccccatcgtctggcggttcggcgcattacgtgtgtgatgttggggagacggtgcagtgcctgtccgagtctacgattggttggcatgccccgccgaatccgcatagtttgggtatagagatttgcgcggatgggggttcgcacgcctcgttccgggtgccggggcatgcttacactcgggagctatggcttgatccgcaggtgtggcctgccgtggagagggcggcggtgctgtgtcggcagttgtgtgacaagcatggtgttccgaagaggaaactttcggtggctgatttgaaggctggcaggcgtggtgtttgcgggcacgtggatgttacggatgcgtggcatcagtcggatcacgatgatcctgggccgtggtttccgtgggacaggtttatggccgtagtctgcggcggtagtggtagtgaggagttaactgtggctgatgtgaaagctttacgtgatcagattaaacaattgtcggcacaggttgcccagtcggtgaataagctgcaccatgatgttggtgtggtgcaggtgcagaatggtgatttgggtaaacgtgtggatgccctgtcgtgggtgaagaatccggtaaccgggaagctgtggcgcaccaaggatgcgttgtggagtgtctggtattacgtgctggagtgtcgtagccgtattgacaggcttgagtctgctgttaacggtttgaaaaagtgatggtggtttgttgtgggtaaacagttttggttgggtttgtttgagcgtgccctgaaaacttttattcaaacgtttgttgccgtgttgggtgttactgcgggtgtgacttatactgtggagtcgtttcgcggtttgccgtgggagtctgccctgatcacagctacggttgctgcggtgttgtcggtggctacctcgtttggtagccctgcgtttgtggccggcaagcccggcaagcctcagctggatgctggtttggttccacccgatgatcctggaatagtggagtctcacttggtggatgtgtcggatccgggcatgattgagcctgtagatgatgcggatcttggtgtaggctatgagcctcggcgtgctgccgagtctgaggttggcacggtagagtctactgttgcataagtgaatatatgtgtgtgccccagcggtgctgccacgatcttgtggtggttgctgctggggcactatttttgtttatgcggtgtggctatgattcgttgctgtcgatggtgtcttcgagcatctggtacaggtggaggcaggtgcagatagtttcgctggcctggtctagaacgttccggccgataacgtttttgtggttgtcgcggtggcggatgatagcccacatgatctcgtcggctgccgcctgtaatagttttgcctggtatgcgattccggcaagccagtctagtgcttcctggctcgcgtagggtgtctggtcctcgctgttgccgcgggtgttgctgttgcttgggtgtcctgcactgtcgcatagccacaggatttcgctgcactcgtctagcgtgtcctggtcgatagcgagatcgttgaggctgacattgttgacggtaaggttcacgttgtcgagggagatgggtacaccgtactggttttcgacactgtcaacaatgttttccagctgttgcatgttggtgggctgttgttggacgatacggtgtaccgctgtgttgagggtggtgtaggtgatattgtgtgtgttgttcatggttttatcccatccttgtgctttcgtcgttttcgtctggatagtatctactgtttgcgtagcctgtgagggtgatcagtgtttggtctgcccactgtttcacggtttgtcttgtcactccgagtcgttgggcggccgacgcatatgtttggtcatatccatagacttcccggaatgcggctagtcgggcgaagtgttttcgctgtttggacggctggcaggtgagggtgtagtcgtcgatggctagctgtagatcgatcatggagacgatgttgttgccgtggtgttgtggcgcggttggtggtggtggcattcctggttcgacactcggtttccatgggcctccgttccagatccattgggcggcttggatgatgtcggctgtggtgtaggtttggttcactggtcaccccttgaataggttgtcgaggttgtctgggttgctggtgttggtggtgtcgaatcgtccgacgcagtggcagtagtcgtacatgagtttgataatgtgttggtggtcgccgaggtaggtgtttccgctgatgctgtaggttactgtgccgtctttgctgatggtgtattttgcggtgatagtttcgggtgtttctgtgttggtgatgatggcggtggtggtggagcctactgtttgtagcctggtggtttgggttccgtcgtcgaggatggttgtgaccatggtgtgtgttctcctttttaaatgctggtttggttgtcggctagatgaataatatcgggtaaaggtttcggttggtctaggtgttgtatggttttgttggctagccgtttggctaccctgtagcacattttggtatagtgtttgttgtctaggttgtggtattgttcccgcaccgcaatatatagcaaagagtcttggtacaggtcgtctgcactgattgcggggtagtgtgcggctgttttggtgcatgcccggttgagtgtgcgtagatgatggtctgtggcccacacccacgacgcggtggtggccaggtcggcttttgttggtcgtctgctcatggcactatttcatctcgctatctggtagttgtttggtgttttgttgtgggtagtgtagcacactagtccggggttgcctgtggtgcctgtgcggtgccggtaccagacggattctccttccatggatgggcattggatgaaggtgcgttgtccttgctcagatatgtggaggtggtgtcggtgtccggccatgagtatatgggatacggtgccgttgtggaattcttggccgcgccaccattcgtagtgttggttgttgcgccattggtgtccgtgggcgtgcaggatccgtgtgccggccacatcaacggaggtggtcatttcgtccctgtcggggaaataaaagtggaggttggggtattggttggtgagttggtaggcttcagcgatggcgcggcagcagtctacgtcgaaggagtcgtcgtaggtggtgactcctttgccgaagcgcacggcttcaccgtagttgccggggatggatgtgactgtcacgttggcgcagtggtcgaattggtggatgagttgcatcatggccatgcgggtgagcctgatttgttcagtcaggggtgtttgtgtgcgccaggcgttgttgcctccttgtgacacgtatccttcgatcatgtcgccgaggaaggcgatgtggactcgttcgggtttgcctgcctgttgccagtagtgtttggcgactatgaggaagcgtaaatagtcgtcggcgaagtgtgatgtttctcctccggggatgcctctgccgatttggaagtcgcctgcccctatgacgaaggccgcagtgctgtagtcggtgcgggtgttgtcggctggttttgggggtgtccattcggctagtttatcgacgagttcgtctacagggtaggggtttgttgcgggttggtggtcgatgattttttgtacggatcggcctgtttctccgttgggtagggtccattcggagatgcgtgtgcggcgtacggtaccgtttgcgagatcatcattaatggtgtcgatggcgttgtcgtggttggctagctgtgtgagtagccggtctatattgtctatcatcgggtatcctcctctcgtggggtggtggtggcttgtttgcggcggtagtctttaatgacggtggcggagatggggtatccggcctcagtgagcattcgggctagctgtgtggcgggtatagacctgtcggcgagcacgtctgcagccttatcaccgtagcgttggatgagggtttcagtcttggttgccatggtgtcctataggttgtgtggtgggctgccatcctgtgcggcagtcgccgtcgtgtcctggtttgcgtgtgcaccacgtggttgttccgtctgtgtggttgagtgttttgccgcacatgacgtttttgagatgctccggcggctggtcggtgttgctgttttgtgtgtcgaagagtgttttttgtgtggcgaaatgctcggatacggtgccgttgtggacgggtattatccatgttttccattgttgttgtagccgactgttccagtggaattgcttggcggcgttttcggcttgtttggcggttttgtagtaaccgacgagtatgcgttgatgctgctggtcgggagggttcgggcctcgccagtattgggcagctacagcgtacctgttgttgtctgtgaagcgcccccagcagtattccaccatgtgtgatagtaccttgtcgggcatgtctcgtacttggttttcgtcgagccacgcgtcgacaatgatgttgcgtatggcttgcttgtctttggtggtgggtttgaatgcgatgctcacagtacgggcctgtcgtcttgcatgaactggttgaaggtgttgttcccggcatgttgggcttgtgtgatttgctggtcggtccagtctggatgttgctgtttcagataataccagtggcacgcattgtaggtttcgtcttgtagccgggcgagatggttttcggtgatgatttgtttccacatggcccatgacacgtcgagccggttgaggatttcgagggctgggatgttgaactggtcgaggaacaggatttcgtgggtgtagtaatttttctcgtaggcgtcccatccgcttcggtgcctgttgggctggtttttggggtaggcttcccggcagattttgtgtaaacgcttggccatgtcgtcgggtagcttgatgtcggggttggcgcggatcatggatcgcatcccatcgtaggtggtgccccaggtgtgcatgatgtgtagtgggtccacgccgtcggcccatttttctgcacagatggcgaggcggatgcgcctcctggcggcttggctggtgttgcggcggccggggatggggcacgtgtcgaggggatccatggtgttttagtgtacctttctttgttggggttgtttgtgtggttttattgtagcactgtgttgagggcttgtgtcaacccggttttgccggtcttaaggtatgtgtctgtgacatcgccgagggtgaggggcacatgggtggcttgggggagcgcggtttggagggtttgggccatctgatcgccggccttgtctgggtcggaccagatgtagatgtggtcgtagccttcgaagaattaggtccagaaggtttgccacgaggttgcgccgggtagggctacggccggccatccgcattgttcgaggatcatggagtcgaattcgccttcgcaaatgtgcatttcggctgccgggttggccatggcggccatgttgtagatggagcctgtgtctcctgccggggttaggtatttggggtggttgtgggttttgcagtcgtgcgggagtgagcagcggaaacgcatttttcttatttctgctgggccgccccaaacgggatacatgtatgggatggtgatgcactggttgtagttttcgtggccgggtatggggtcattgtcgatgtatccaaggtggtggtagcgggctgtttcttcgctgatgcctcttgctgagaggaggtcgagtatgttttcgaggtgggtttcgtagagggctgaggctttctggattcggcggcgttccgcaatgttgtatgggcgtatgctgtcgtacattcgggttttcttcttctaatcgttgttgtagcttggcgagtccgcctccgacaccgcatgtgtggcagtaccagacgcccttgtcgaggttgatgctcatggagggctggtggtcgtcgtggaacgggcagaggatgtgttgctcgtttcgtgacgggttgtagcgtatctggtgggtgtcgaggaggcggcgggtgtcggaggtgtgggaggagctcgttgagggttgataccacataggcttcgctccagggtttgttgcgctgtttcattactacgagtccgatggtggaattgttttgtttgtttcggtgtgtttcgtagttgcgtgcctcaagggttgcttctttgacgaattgggctaggtgtggttgcccggctttcgcctcgataatgtaggttttgttgccggttgtgaggatgaggtcgccctcatcctctttaccgttgaggtggaggcgttcgatattgtgtccggtgtcgcgtagctggtgcaataatcgtgtttcccattctgcgcctgcccgccggttgcgtgcctgctgtgtggccatcatagtcctttgtgtgttgtggtcatgttccagggctgtttttcgaccaggggtccgaagaatgtgtattcggggtaggctcgtagccgttcgtatcgggttccgtctgggctggatttgcctgtgcgctgtttgagtacggcgatgcgagcctcggcggggatcgataggccgttgccgttgtcttcgccaccatacagggagactcccaatatgagttgtggtttttcggagaggccgtttttgatttcgcggcgtgccggggggtgttcgatgtcggttcctgttttgtcggttgcgtggtgggtgacgatgatggtggagccagtatctctgcccaatgctgtgatccattgcatggcttcttgctgtgcctggtagtcactctcgcagtcttggatgtccatcaggttgtctataacaataatgggtggtaaggtgttccttatttccttgtaggcttgcagttccatggtgatatcggtccatgtgatgggtgtctggatttagaatgtgatgtgtgcgccgtggtggatgctgtctcgatagtattctggcccgtagttgttgatgttgtgttgtatctgttgggtggtgtgttgggtgttgagtgagatgattcgtgtggaggcctcccagggtgtcatgtcccctgatatgtagagggcgggctggttgagcatggcggtgatgaacatggctagcccggatttttggctgccggaccgccccgcgatcatgactaggtcccctttgtgaatgtgcatgtcctggttgcggtagaggggttctagttgtggtatgcggggcagttcggcggctgtttgggaggctctctcgaaggatcgttgtagagagagcatcggagccttaatctatctgtctatcggttggatgatgttttggtggtcagatggagtcgatgtcgatatcagcatctgtaggggctgtggtgtcgtctagctggccgttatcgcgcttgtctacgtattcggcaaccttatcgtagatggcgtcgtctaatggtttgagcacgaccgcgttgaacccgtttttggtgcgtacggtggcgagtttgaaggcctgttcttctccaaggtaggcttcgaggtcgcggatcatggagtgtgggcggtcgttgttgccgcgtgctttttcgataatggcgttggggatggtttctggggtaccgttgttgaggtcgtctagggtgtggaagattgtgacatcagcgtagatgcggtctgcgacctgtccaccgtagccttcggtgttgtgttctacgtcgtggactttgaaggcgatggcggtggcgtcctggtttcgggaggggttgaagaaggtgctgttgctgttgttgcggtagtttgcgagtcccattgttgtttccttgactgtttgtgttgttttgtttgttggtttgtgtcggtttttatcgggtgaggctgtttcgtttagtgcggaacgcctctgacacgtcactgttactggtgatggtctttttgtactgtttgaggaggtcggctagctgtgctttgctggtggctttgttgattttgtcgatgatggtgttgtttccttctgatgcgattttgttgacgtagtctttggcggcctggttgtatcggtcttggaggatgatggatgctgtggcgatcagggttgccaggtcccagttccttgccgcggagctgtttctgagtccgccgaggaggtcgatgatagtcttctttacctggtcggcggtgtctccgcggatgacggtccatggggcggcgtagtctccgccgtatttgagtgtgacggtgaatcggtcgtcgtctgtgttgtcggtcactggtgctccttgtcttcttttgttggggctgtgatggtggtttctatcgggtacctgtaggcgtctttcccgttgacagcccagcaggcgtccctgtcggggcatcccttacagagtgttgtgacgtggggtacgaagatgccttggctgattcctttcattgcttgactgtacatggatgatacatgccggtaggtgttgttgtcaaggtcgtagagttcggtggatgtgccttgggtcggggacttgtcgtcgttgcggctggtggctggtgtccaaaacatgcctttcgtgacatggatgccgtgttggttgagcatgtaccggtatgtgtgcagctgcatactgtcggcgggtaggcggccggttttgaggtccacaatgaaggtttcacccgtattcgtatctgtgaatacccggtcaatatatccgactatttttgtgccttcttggagggtggtttctacagggtattcgatgcctggctggccgtccaggattgcggtgatgtattctggatggttgcgcctccatgttttccagcggtccacaaaggtggggccgtatatcatccaccaattgtagtcttttttgtgtggcccgcctgactcgcacatgtttttgcatattctgccggagggtttgatgtttgtgccttcggattcggcgagggcgacttgggtgtcgaaaacgtttttgaaggatgcgagtttgtctggcagtgcagggtattctgcgggattgtacaggtggaggtcgtattgttcggtgatgtggtgtatagcactgccggcgatggtggcgtaccaggtgtggtgttgtgcatggtagccgtgggataggcgccatttttctccgcattcggcccactgggacagggaactgtaggagatgtggcctggatggtgaatggttttcgggtattgtgctagaggcatgttactggtcgcctttgtgggtgttccatgggttgcgggtgtcttggccggcattgtgttgctggtaggcgaggagtgcgaggcagtgccaggcagcatgtgccagatgcggcaaatgtgattcataatcgaggttgttgccttgctgccatgatagtaggtgcctgtagagggcgtcgacgctgtggctccacgggtagccgccggtccagttgttgtcgccgtatttggtggcgccgtatcctgccacggagccgagggcgtgtaaggctgtggggtcgatgagggatagcctgcaaagtttcagttctttcttggcaccggtgtcagggtcggtgtacatgcgggttggctcatccatggtgtgtgtgctccttgagtgtgggttactggttgggggtgtgggcgagtgctacggcgagaataatgatggcgagggtttcagcaataagtatgggtgttgtgatcatttagtgtctcggggatggtaggtgagtgttgatgctcctaggagggtggcgagggcgcttgc

SEQ ID NO: 70 - DNA, 11886 bp, Pahexavirus sp.
  source 1..11886: mol_type = genomic DNA
taacaaatcaggctcacccgcatggccatgatgcaactcatccatcagttcgaccactgcgccaacgtgacagtcacatccatccccggcaaccacggcgaagccgtgcgcttcggcaatggagtcaccacctacgacgactccttcgacgtagactgctgccgcaccatcgcagaagcctaccaactcaccaaccaataccccaacctccacttttatttccccgacagggacgaaatgaccaccaccgttgatgtggccggcacacggatcctgcacgcccacggacaccaatggcgcaacaaccaacactacgaatggtggcgcggccaagaattccacaacggcaccgtatccaatatactcatggccgggcaccgacaccacctagaaatctccgagcaaggacaacgcaccttcatccaatgcccatccatggaaggagaatccgtctggtaccggcaccgcacaggcaccaccggccaccccggactcgtatgctacactatcaacaacaaaacaccaaacaactaccagatagcaagataaaagagatgctatgagcagacgaccaacaaaagcagacctcgccaccaccgcatcgtgggtgtgggccacagaccatcatctacgcacactcaaccgggcatgcaccaaaacagccgcacactaccccgcaatcagtgcagacgacctgtaccaagactctttgctatatattgcggtgcgggaacaataccacaacctagacaacaaacactataccaaaatgtgctacagggtagccaaacggctagccaacaaaaccatacaacacctagaccaaccgaaacctttacccgatattattcatctagccgacaaccaaacaagcatttaaaaggagaaccccacaatggtcaccaccatccccgacgacggaacccaaaccaccaggctacaaacagtaggctccaccaccaccgccatcatcaccaacacagaaacacccgaaaccatcaccgcaaaatacaccatcagcaaagacggcacagcaacctacagcatcagcggaaacacctatttgggagaccaccaacacatcatcaaactcatgtacgactactgccactgcgtcggacgattcgacaccaccaacaccagcaacccagacaacctcgacaacctattcaggggatgaccagtgaaccgaacctacaccaccgccgacatcatccaagccgcccaatggatctggaacggcggaccatggaaacccagtgtcgagccgggcatgccacccccaccaaccgccccacaacaccacggcaacaacattgccaccatgatcgacctacagctagccatcgacgactacaccctctcctgtgaaccatccaaacagcgaaaacatttggcacggttggcagcattccgtgaagtatacggatacgaccaaacctacgccgccgccgcccaacgattgggtgtcacccggcaaaccgtgaaacagtgggcagaccaaacactcatcaccctcacaggatacgcaaacagtagatactacccagacggcaacgacgacagcacagggatgggataaaaccatgaacaacacacacaatatcccctacaccgccctcaacacagcgatacatcgaatcatccaacaacagcccaccaacatgcaacagctagaaaacattgttggcggtgtcgaaaaccagtaccgtgtaccaatctcactcgacaacgtgaatcttaccgtcaaagaagtcagcctcgacgatcttgctatcgaccaggacacgctagacgagtgcagcgaaatcctgtggctatgcgacagtgcaggacacccaagcaacagcaacacccgcggcaacagcgaggaccagacaccctacgcgagccaggaagcactagactggctcaccggaatcgcataccaggccaaactattacaggcggcagccgacgaaatcatgtgggctatcatccgccaccgcgacaaccacaaaaacgttatcggccgaaccgttctcgaccaggccagcgaaaccatctgcacctgcctccacctgtaccagacgctcgaagacaccatcgacagcaacgaatcatagccacaccgcataaacaaaaatagtgccccagcagcagccaccacacgatcgtggcagcaccgctggggcacacacatatattcacttatgcaacagtagactctaccgtgccaacctcagactcggcagcacgccgaggctcatagcctacaccaagatccgcatcatctacaggctcaatcatgcccggatccgacacatccaccgagtgcggctcaaccaagcccccatcatccggtggaaccaaacccgcatccacctggggctgcttgccaggcttgccggccacaaacgacgtattaccaaacgaggtagcaaccgacaagaccgcagccaccgttgctgttatcagggcagactcccacggcaaaccgcgaaacgactccgcagtatacgtgacacccgccgtcacacccaacaccgcaacaaacgtttgcacaaaagtcttagccgcccgctccagtaaacctaaccaaaactgtttacccacaacaaaccaccatcactttctcaaaccgttaacagtagactcaagcctactgatgcggctgcgacactccagcacgtaataccagacactccacaaagcatccctggtacgccacagcttccccgtcaccggattcttcacccacgacagggcatcaacacgtttacccaaatcaccattctgtacctgaaccacaccaacatcatggtgcagcttattcaccgactgggcaacctgtgccgacaattgtttaatctgatcacgtaaagctttcacatcagccacagttaactcctcactaccactaccgccgcagactacggccataaacctgtcccacggaaaccacggccccggatcgtcatgatccgactgatgccacgcatccgtcacatcagtgtgcccgcagatgccccgcctgccagccttcaaatcagccacagacagtttcctcttcggaacaccatgcttgtcacacaactgccgacacagcaccgccgccctctccacggcaggccacacctgcggatcaagccactgctcccgagtgtaagcatgccctggcacacggaacgaggcgtgcgaacccccatccgcgcaaatctctatacccaaactatgcggattcggtggggcatgccagccaatcgtagactcagacaggcactgcaccgtctccccaacatcacacacgtaatgcgccgaaccgccagacgatggggaagcaaaatagtttgccgtggacaccgcccgtcctttacgcgaggcggacggaaaccccacatccgggcatgtcgcatgaatcacaaccctattcaccggatgattagaaccggcagagtgatgcgctgcaggaatgtatctcaccacacaccaccaccaaacactaccatcacagccactcctttctatttgtgggatgatatagtcactataggcgacggtttcacaccctggcaggccaccgagcccgacaccgtggaaaccacaccgtcactatatttcacaaccaggcggcccccagcacagtacaccgatatcaccgaacgcccatcacggccatcggcgccatcccgaccgtctttaccgtcggatccgttcacaccgtcggggccacgctcaccccgttcaccctgcgcaccagggggtccgacaggacccgaaggccctacttcgccgcgctcaccagccgaaccatcacggccatccttgccatcggatccgttcacaccgtccacgcctgcacggcccgaaacaccatcacggccatccgaaccgttagcgccgggcagcccgtcaggacctttcacaccattcaaaccaggggaaccctgcggaccgacagggccaaccagcccagccgaaccattaacaccatccctgccgtcaacacctgccgggccttgcgggccgcgctcaccggccggacccggcacaccctgcacactccgctcaacacgctgagcatccacacacaaaccagaccggtgaagccgcacagactcctgcccgccagaagcacacacctgccgcacacgggcagccaaacccttggcggctgtaccattcgactgggctttagcctgctccgaatccctttgcgaagccacagacccgtaccgtaaagcacccccggcaaccaccgccaacagtacaagcgacaaaaacaacagtatcagtgaagccttctcaaaattgcggcgctgccgcttctcctcctccaactccctcaaccctactcacctccaccatcaacaatatacttcaaaaactcgggcaaatcaggcatcttcacaggctcaacatcatccggcagattcgcgttatagcggtgaacaatatggcgaatactccacgtgtactcttccatcgcatccacctgcgcagacaactgcctcaaccgcttcttcgacctgtacgtaaccgcctgaacagaacccaaaaccgtggcgatagcggtacaaatagaggccacaagcgtaggtgtaaaccatgacactacagccccctaccactacaaccaccacaacacgtcacatacccgcaagccgcgcattacacgccgacagcaatccagttagccatcgcaggcacaccagaaggcttagaaccatcattcgtgataaacgccaacccaaaatccttggtagtgatattgtaggccttcacatcaatctgtgtcgtgcccccagcagccgtgcccatagacgccaccacgataggcggactatcaaacgggcgggcaaacgggatcgtgtaagcatacacagcagacccgccaaactggatctgcttagaacccgtctcaacccggggagacaggagcatccactcgttagcatggttagcccacacagcccccgaaggaaccatcacacggtcaccctccacaggggtcgggtcacacgcagcagactccccaaacgcaaccctggccgccacagcacgcctatccaactgctgctgcaacccgttagacgacaccaccaaagtagccagtagctgctgatggtacacgccaggctcggcacgcaacacgtcacgggcacgctccgcacggccaccctgaacaatctccaacttggctgtgttctgctcccaatcccgagacaacaccacatagtcgtatcgggtctcaccagggccaggcagctgccctgtcaccgtctcaacactactagaagtgcacatcaccccgtgagcccaagcctgccccggcaggacatcgcacaacaccgtggaaccctgaatcgtcgtgccgacacgaaaatcgtccgggcctttcacggacggcatattacccatcagaccagacatttgagcccaatcatactcggttaacacaccatcaaaccctttacacacaatacccacaacaaacccccaattcttttctaaaatttttgcaaatcccgcacacccgcagccaaatcagccacacggcgagccaacagggccgacggattatcctcataatcccccgcaataggagtcaccttcgtccacccgtcaccaggcgatacacactccacatcaatctgccgaacaatctccgcaataggccccgagcccacatccacatagatcaaatcacccggcatcagattgcctggcccaaaccgcaacacatccgactcagccaactcgatcttaaaccccgacgtggcccccaactcggacaacacctgctcagcctcatcaataagatgcacatgttcagaatccgtgttacgggcatccttaaacacctcgacacaatcaaaccaatcctcctcagccatcgaatcaacatcctcgcaaaacagccgatccttgccctcgccgcggccaccaaccaccaccgaagtagccttcggggcgtcgcgcacatactcccacgacacaatcgaaccagactcggcagtcaacacatgcttccgggtcacagcaggcacacaatcaaacaccaaaccccgctgatcaaacttcgcattctcaaactggttcaccgtgacagtcatccgagcccacgacaacaccggcaacaacttatcagcaaacacgtgaaaccgcacctgaaaatccttaatatagcgtccacgacgctcatcatcggtcataaacaaaccaggcggaaaacgccaagcattatcccccaacacctgcttagcaaccgactccgccgcaccagaatagtgggcataatccctgtccgcacgccactccgaacccaccaaaccgggacgataattcacaggccacatcaacatacgccacaacaggcggatatcatcctcacacgtgatagtcacacgcgaagaacgccaaggacccacaccatgaaccttacgcacaggcccagaaaaaatctggccaccaccataatcaacaaccagccgtgcacccggcctagtcaacccgtcaagcctcgaatgatcacccgacaccaccaactccagcgtcgacaaaccattccacttcaacgacaatttcaacgactcaaaaaaattgataggcgccacacggcgataatccggcgtaaacaatgttacatgcggaacaagaccagccatcaactattcaccaagccctcaaaaacctgtactgcaccgacacaacaatggcacccaaaccaaccatctcaatattcacactcttcgaaccgccaggcgagataggcgcaaactcccactccgtcaaacgatccatcacatcctcaaacccgttcagtagcgcagactgcttacgaggatccgtatcaatagtgatccaatcaaactcctccaccggatagtccgaagacacacgcaaaccatcaatctccacagaccacgactccaaaggcccctcgacacgaatcacaggccacgcaggcacatcacccttattagacaggttatcccagcccgagcccacacccggtgtcaacacaacaggaaacgctgtacccttcttattaacagggccgccacccaaccaatcctgcaacttcgcgttactaaaacgaaacttctgctcatccccataccaaaacgggtcataagctgtcaaatgaagcacatagcgggcatagccgcgattcaccggatcaaccgtaaacgtgtcatccaccgaatcaaaccggcagtgtagcacacgctctttgccggcaggagtcttcaccgacaactcccccacctcgcccggaggaaaagcagaccacaactcgtcataggctttcaaaaaaccgtcacgaaacccgcccaccggatccgggtcaacacccgacaccaacaccggcaaagtcacctcgcgaggcttcacattaaacccgcgccactccgagccgtgcaccccaacatgtgtttgagaaaaatgctcaacctcgggaacacccaaaccgcgcaacgaatcattcaacaacatcaccggagacgaccccgtataatccgtcaaatgaagcacacgctccggaccattaccaatcaacggcaacatagaccaagtcacagtcaaaccagaacgatcagacgggtcaggaagaaacatgaacaacacccccaatcacacgtaagccaaagcgttcaaagcgtcacgctgctgacgctcaatccgcttcgcaaactcggcaggatcaccatacgtcggtccgttaacattcaccacaacactcttatcattcatgcgctgatacctgccatacggtgtaaacgagcccaccgacgatcgcacaccaacccgggcatcaaccgcatcaggcaaccgaccagccacacccgacatcgcatccaacgccaaaccggcattcccggtgatcccctcagccaaaccggcaacaacctggcggccaacctggtcacgaaacaccctagacggggaatgaatacccaacaccgacttcgccgcattagcaacctgagaacccatattacgcaccgtatccaacaggccactcatagcattccggataccattacccaaaccagaaaccacttcacggcccgcagacaccaacagggaccccatattaccgagagcgcgcctaatattaccgggcagattccggaaaaaccctagcacaccatgcacaccattggaaacagcggaccccatagcatgcatagcagaagatgccgcactccgggcaccattaaacccgcgcacagcaccactacgaaccctagacgccatcgaactgaaaaacccgccaacagcagacgccaccgaagacacaatactccggatagcattcatcgcggaagaaacagcgccacgagccgcattaaaaccagaccgaacatgagaagcaaccgacaaaccaagccgcgtaaaaaaccccacaaccgcggcaacgccgccagaaatgatcgacttaaaaccgttaataaacgcagacgtaaacgatttgatatgattccagccattctggatggccgtgcccatagacctcacgccagacactaaatgattcacaacccatgagatgacacgggcgacagtcccaataatgcgggcttcagcagacacaatagcgccaagaatacgtgcaacaaacccgatcaccgctgtcacaatcggcatcacaaccggaataatgcgggccaccacctgcaacacaaccgaaacaacctgcatcaccacacgcataatcgacatgatgactggtatcagcgaccggatcaggccgatgataggcggcagaacagacatgacagcacccaaaatctgttgaatcacaggcatcaaaacaggcaccaactgcatgatcacgccaacaacctgccgtatcacagcaacatccgcctgcaacaccggcatcaacgcaggcaacaacattgcagcaacctgtgtcaccgcaccaataatctgcgtgatcacaggaaccagccgggcgacaagcatactaatcaaaggcaccagctgggcagccaaacccgcaaccataccgataatctggccgaacactggcgccaactgtgccacaaccccggcaaccaaaccaaacagcggctgaatagccgccataatctggcccaaagcctgaccaaccacaccaaccagctgcatcaccgcggcacgaaactgggcgttagtggcagacatggcagcaaacaagccgatcacaataccaacagggccacccaaagcgcgaaacacgccaccaagcccgccagcggcacccttcaaagcaccaaacgacggcagtagattcttcaacgccaccgccagcggggcaaaccctgcaacaagcttccccacaccggcagcaacaataccaaacactgcggtgccgccagcaaacatggcacccaaattcactttagggacaggcaaatgcaaccttgcaaaaatgtccttcaactgctccaccttggcgcgcatctgtgcattcattctcgtgatcatgcccggcatacgattaatccacgccaaaatagacggcatcatacgctgaataccggcatcgacggcagcaaacatcggcttcacagaatccgtgacagacttaataaccggattcaacgcaacaaaaatctgccgcaacccgttaagaaacggcgccatagccgtggcaccaagataacccagggcgcccttaacattcttcatagcgccctcaaacgtctgaccagacgcctgcgcagcaccacccatgccaagcttcatcgcagccgcaaacgtgttaaaatcaatctgccccttcgacaccatctgcgacacctcagcagacgttttaccagtctgcctggcaagcaaagacagcacaggaacacccgccatcgtaagctgcaacatgtcatcgccctgcaacttaccgcgagccatcacagacgtaaaaatagcgccagtatcctgaaacgacttaccagaaatataagacacatcggcgacagtcttcaacacatccgtcatctgcccgccagacttcacacccgaagcagacaacgccgcagccgtagacgccgcatcccccaacgcatacgaagtaccagtcacagcctcaatagccgaattcataatcgaagacgtgtcagaagacgtgtgacccaaaccagtcaacttcgcttgggcctcatcaatagccatagcgcgagctataccgccaccaatagtcacatcataaatcgacttgaggcccttcttagcaacattgatggcaccctccattgcggcgccacccaaagccaacttcatacccttagcaaacaaactacccgaacgctgaccctcagcaggcataaccccagaaagctgtttaccaacatcacttttaaggccaggcatcttcgtatacaacgacacatatgcggaagcaatctcaccagacatacactattcaccccataatattaatctcgcgagacaccccgccgccggcacgaacacgcgccaaaatatcgtccacctgcccagacgtagaccgggccctacgctcatccgtcggcctcgccacaggctccggctgcccctcactattagcagacctgtaatgatccaacatgtccagcacagcccactcgcaccactcaaacgggcgctgccaaccattcaggtgggccgccaactggctcgacgtatcggtacacaacacgccagccagccgaacagcctcaccccaacacatcaccgggccaccaacatcataaaccgagcaaccgaacctggtcctccaatcatattcgatggccccacgataatcatcaatcaggccgtggagccaaactattcccccaaggaggccgctttctggtcgggcttccattccatccactggcggaaaatctcggcaacacgaaccataggaagcccctccaaggcctccacagcgtcagccggggcggcagcctccaacatagaaaacatcacctcaacctgggcgaaatccgcaaactcccccgactgggcaatcctggcggcacggcgaaaaacgcgggcaggaacagcctgagccgtctcctccgcatccgccaacacccagctacggtcgccaatcttcaacgtgtaacctgtgtcactcatctatcaacaatcccttaaactcgtgtatcagttctcagccggcggattaggatccggcttcggcgaaggaggaggcgtcggaggagtatcagcttttaaagccgtcatccacccccgaccagacaccgcatcacccttcttattaatctgggcaggatacgccttcaacgtcacaccatacccatacacctcgccattcttacccttaatctcgtcacgatcgacaagctcaacctcagggaaatagtagcgaataacctgatcaccatcaataatatccatcaacagggcatgaacacccgtcgtggcaccaggagaaatatcaaacgaacccgaatcggatccggcagtaaccttcgactgccaaaacagttcgataacctccttcttcgactcgatcggctcgaaagaaatctcgatagatgactcagtagcaacagtgcgaaccacatccgcattctgccaagccttcaaatcatcagttttacgctccggcttaatcttaaacccgtcatccgacagataccctaaagctgtaagcccatcaggaaccgcctccacacccttaatagtatcacccgcatgagctttaccaatataaacgtcacccgtaacagcagagcgaacattagacgctttacgtgtttcagccatcataacccccaaaaaacaatcaaactacaaaacaaacaacaatatcaaaacaaaacgtttactcggattcgacaggcctgcatatcagctcaaaaagcgaatacacatcaaaacgtgcaccattaaccaaaagatcagggccagtagaccgtttacagt

SEQ ID NO: 71 - DNA, 13101 bp, Pahexavirus sp.
  source 1..13101: mol_type = genomic DNA
cgtgggtgaagaatcctgtgacggggaagctgtgtcgcactaaggatgctttgtggagtgtctggtattacgtgctggagtgtcgtagccgtattgacaggctcgagtctgctgttaaccggttgaaaaagtgatggtggtttgttgtgggtaaacagttttggttaggtttactggagcgggcggctaagacttttgtgcaaacgtttgttgcggtgttgggggtgacggcgggtgtcacgtatactgcggagtcgtttcgcggtttgccgtgggagtctgccctgataacagcaacggtggctgcggtgttgtcggttgctacatcgtttggtagcccgtcgtttgtggccggtaaaccgaaaacgtcgcctgttgtggatgcgggtttggttccaccggatgatcctggaatagtggagtctcacatggttgacgaaacggatcctggcatgatagagcctatcgacgatgccgatgctggaggctatgtgccgaggcgtgcagccgagtcggaggttggcacggtagagtctactgtagcataagtgaatatgtgtgtgtgccccagcggtgctgccacgatcgtgtggtggttgctgctggggcactatttttgtgtctacaggggttttacaggttgtcgtctcgggtgtcttcgagtgtctgttgtaggagtgtacactcggcgagggtgtcttcagcctggtcgacaatgttttgttttgctatgcctggatagttgtcgcggtgattgtagatggcttccagaatgttgtccgccatgatttgtagtgttagggcctggttggtgatgcattccagctcgtctagggcggcctggctagcctccggctgccggttgcccgggtgttctgcaaggttgcagtcccacaggatttcttggcatgcatccctggtgtctgcgtccacatcgatgtcgtctaggctgacaccgttggcgttgaggctgatgttgtcgaggttgatgggaaccagatattcgctgctgatgctgcaggtgatgtttgcgagttctgtcatgtttcgtggctgctgctgtatgatgcggcgggccgcggttttgagggctgtgactgttcggtgtctgttactgggcatcgtttctattcttcttccccggtgtagctggtggtgttggtgtactgggtgagtgtgatcaggcactggtcggcccacggtttcactgtctgccgtgtcacactcaatcgttgggctgccaccgaataggtttggtcatacccgtagacttccctgaatgcggcaagccgtgctagccgtttccgctgtttggatggttcacatgtgagggtgtagtcgtcgatggccagttgtagatcgatcatggagacgatgttgttgccgtggtgttgtggcgcggttggtgggggtggcatgcccggttcgacgctcggtttccatgggccgccgttccagatccattgcgcggcttggataatgtcggctgtggtgtaggttcgggtcactggtcatcccctgaataggttgtcgaggttgtctgggttgctggtgttggtggtgtcgaatcgtccgacgcagtggcagtagtcgtacatgagtttaataatgtgttggtggtctcccaaataggtgtttccgctgatgctgtaggtggctgtgccgtctttcgcgatggtgtatttggcggtgatggtttcgggtgtttctgtgttggtgatgatggctgtggtggtggtgcctactgtttggagtatggtggtttgggttccgtcgtcgatggtggttttaaccatggtgtgtgttttccctttcagttgctggtttggttgtcggctagatgaataatatcgggtaaaggtttcggctggtctaggtgttgtatggttttgttggctagccgtttggctaccctgtagcacattttggtatagtgtttgttgtctaggttgtggtattgttcccgcaccgcaatatatagtagggagtcttggtacaggtcgtctgcactgattgcggggtagtgtccggctattttggtgcatgcccggttgagtgtgcgtagatgctggtctgtggcccacacccacgatgcggtggtggccaggtctgcttttgttggtcgtctgctcatggcactatttcatctcgctatctggtagttgtttggtgttttgttgttgatagtgtagcgcactagtccggggtggccggtggtgcccgtcttgtgccggtaccagacggattctccttccatggatgggcattggatgaaggtgcgttgtccttgctcggagatttctaggtggtgccggtgccctgccatgaggatgtgggatgtggtgccgttgtggaattcttggccgctccaccattcgtagtgtttgccggtgcgccattggtgcccgtgggcgtgcaggatttgtgtgcctgccacatcgacggtggtggtcatttcgtctcggctggggaagtggaagtgtaggttggggtattggttgttgagctggtaggcttctgcgatggcgcggcagcagtccacgtcgaaggagtcgtcgtaggtggtgacgcctttgccgaagcgtacggcttctccgtggttgccgggtatggatgtgaaggtcacgtttttgcagtggtcgaattggtggatgagttgtatcatggccatgcgggtgagtctgatttgttccgtcaggggtgtttgtgtgcgccaggcgttgttgcctccttgtgacacgtatccttcgatcatgtcgccgaggaaggcgatgtggactcgttcgggtttgcctgcctgttgccagtagtgtttggcgacgatgagggagtgtaggtagttgtcggcgaagtgtgctgtttctcctccggggatgcctttgccgatttggaagtcgcctgccccgatgacgaaggccgtattgctgtagtcggtgtgtgtgtctggtttggggggtgtccattcggctagtttatcgacgagttcgtctatagggtaggggtcggttgcgggttggtggtcgatgattttttgtatggatcggcctgtttctccgttgggtagggtccattcggagatgcgtgtgcggcgtacggttccgttggcgagattgtcttcgatagtgtcgatggcgttgttgtggttggctagctgtgtgaggagccggtcaatgttgtctatcatcgggtatcctcctctcgtggggtggtggtggcttgtttgcggcggtagtctttgatgacggtggcggagatggggtatccggcttgggtgagttgttgtgctagccaggatgcggggatggacttgtcggcgaggacgtctgcggctttagccccgtagcgttggatgagtgtctcagttttggttgccatggtgtcctatcggttgtgtggtgggctgcaatcctgtgtggcagtctccgtcgtgtcctggtttgcgtgtgcaccatgagacttcgccggcattgtggatgatggcacggccgcatatgacgtcatgtaggtgttcgggaaacttgccgttgttgtccccgtacatgtcgatcaagtgttgggttttagtagccatcatgtctcctatatgtgaaagagtgtgcaaatactatgctggtgtcatggatgtttatgcgggtatggttttcatcaccttgctgaacgttacttcgttactgtacatcatctgggtgatttcctgatccgttttgtcggggtgctgttttcgcaggtttgcccattggcaggcgttgtcggtttcctgctgtaaacgtgtcaggtgctgctcgttgatgatgtgtttccacatggtccatgatacgtcgagccggttaaggatttcgatggctggcacgttgaactggtcaaggaagagtgtttcctccgtgtagtagtctttttcgtattggtcccatccgcttcggtgcctgttgggctggtttttggggtaggcttcccggcagattttgtgtaaccgtttggccatgtcgtcgggtagtttaatgtcggggttggcgcggatcatggatcgcatcccgtcgtaggtggtgccccaggtgtgcatgatgtgtagtgggtccacgccgtcggcccatttttctgcacagatggcgaggcggatgcgcctcctggcggcttggctggtgttgcggcggccggggatggggcacgtgtcgaggggatccatggtgttttagtgtacctttctttgttggggttgtttgtgtggttttattgtagcactgtgttgagggcttgtgtcaaccctgttttgccggtcttaaggtaggtgtctgtgacatcgccgagggtgaggggcacatgggtggcttgggggagcgcggtttggagggtttgggccatctgatcgccggccttgtctgggtcggaccatatgtagatgtggtcgtagccttcaaagaatttggtccaaaaggtttgccacgaggttgcgccgggtagggcgacggccgaccatccgcattgttcgaggatcatggagtcgaattcgccttcgcaaatgtgtatttcggctgccgggttggccatggcggccatgttgtagatggagcctgtgtctccggcgggggttaagtatttggggtggttgtgggttttgcagtcgtgtgggagtgagcagcggaaacgcatttttcgtatttcggctgggccgccccaaacggggtacatgtatgggatggtgatgcactggttgtagtcttcgtggcctgggatggggtcattgtcgatgtatccaaggtggtggtagcgggctgtttcttcgctgatgcctcttgctgagagcaggtcgagtatgttttcgaggtgggtttcgtagagggccgaggctttctggattcggcggcgttccgcaatgttgtatgggcgtatactgtcgtacattcgggttttcttcttctaatcgttgttgtagcttggcaagtccgcctccgacaccgcatgtgtggcagtaccagacgcccttgtcgaggttgatgctcatggagggctggtggtcgtcgtggagcgggcagaggatgtgttgctcatttcgggacgggttgtaatggatgcggtaggtgtcgaggaggcggcgggtgtcagaggtgtgggaggagctcgttgagggttgataccacataggcttcgctccagggtttgttgcgttgtttcatgatgacgagtccgatggtggaattgttttgtttgtttcggtgtgtttcatagttgcgtgcctcccggccggcttgtttcacgaagtcggcgaggtggggttggcccgccttggcttcgatcacgtatgtgtggtttttggttttgaggatgaggtcgccttcgtcttcgcggccgttgagatggagtcgttctatatcatagccggtgtcgcgtagctggtggaggagtctggtttcccattcggctccggcccgccggttgcgtgcctgttgtgtagccatcatagtcctttgtgtgttgtggtcatgttccagggctgtttttcggcgagtggcccgaagaatgtgtattcggggtatgctctgagtcgttcgtatcgggtgccgtcggggctggatttgccggtgcgctgtttgagggcggcgatgcgtgcctctgccggtatcgtgaggccgttgccattatcctcgccaccatacaatgagactccgaggatgagttgtggtttttctgagagtccgtttttgatttctcgccgtgctggcgggtgttcgatgtcggagccggttttgtcggttgcatggtgtgtgacaataatggtggagccagtatccctgcccaatgctgtgatccattgcatggcttcttgctgtgcctggtagtcggattcgcagtcttgaatatccatcaggttgtcgataacaatgagtggtgggaaagtgttccacatttccatgtaggcttgtagctccatggtgatgtcggtccaggtgatgggtgactggaatgagaatgtgatgtgttggccgtggtggatgctgtctcgatagtattctggcccgtagtcgtcgatgttgtgttgtatttcagcggttgtgtggatggtgttgagtgaggtgattcgtgtggaggcctcccagggtgtcatgtcccctgatatgtagagggctggctggttgagcgtggctgtgatgaacatggcgagccctgatttttggctgccggagcgccccgcgatcatgactaggtcccctttgtggatgtgcatgtccaggttgcggtagaggggttctagttgtggtatgcggggcagttcggcggctgtttgggaggctctctcgaaggatcgttgtagagagagcatcggaaccttatctatctgttacggtttgggcggagagtggtggtcagatggagtcgatatccacttcatcactgcccgtggtgttgggctggctgtctcgcttgtcaacatatgcggcaaccttatcgtagatggcgtcatcaaggggtttgagcacgaccgcgttgaacccgttttttgtgcgaacctgtgcgagtctgaaggcttgttcttcgccgaggtaggcttcgaggtcgcggatcatggagtgtggacggtcgttgttgccgcgtgctttctcaataatagcgttggggatggtttctggggtgccgttgttgagatcgtctagagtgtggaagatggtgacatcagcgtagatgcggtctgcggtctgcccaccgtagccttcagtgttgtgttccacatcatggactttgaaagcgatggcggtggcgtcctggtttcgggacgggttgaagaaggtgctgctgctattgtttcggtagttggcgagtcccataatggtgttatcctttactgttgtgtctgtttttgttggcttatattggtttatcgggtgagactgtttcgtttgctgcggaacgcctctgacacgtcactgttactagtgatggtcttcttgtactgttttagaaggtctgctagctgtgctttgcttgttgcattgttgattttgtcgatgacgatggtgttttcgtttgatgcgatattgtctacgtagtctttggcggcctggttgtatcggtcttggaggatgatggatgctgtggcgatcagtgtcgccaggtcccagttccttgccgcggagctgtttttgagtccgcctaggaggttgatgatagtcttctttacctggtcggcggtgtctccgcggatgacggtccatggggcggcgtagtcgcctccgtatttgagtgtgacggtgaagcggtcgtcgtctgtgttgccggtcactggtgctccttgtcttcttttgttggggctgtgatggtggtttctatcgggtacctgtaggcgtctttcccgttgacagcccagcaggcgtctctgacggggcagcctttacagagtgttgtgacgtgtgggacgaagatgccttcactgattcctttcattgcttgactgtacatggatgatacatgccggtaggtgttgttgtcaaggtcgtagagttcggtggatgtgccttgtgtcggggacgtgtcgtcgttgcggctggtggcgggtgtccaaaacatgccttttgtcacatcgttgccgtgttggttgagcatgtaccggtatgtgtgcagctgcatactgtcggcgggtaggcgtccggttttgaggtcgaggatgaaggtttcgccggtgtcggtgtcggtgaaaacgcggtcgatgtagccgactatttttgtgtcatcgtcgagggtggtttctacggggtattcgatgcctggctggccgtcaataacagcggtgatgtattctgggtggttgcgcctccatgttttccaccggtccacaaaggtggggccgtacatcatccaccaattgtagtctttcttgtgtggcccgcccgactcgcacatgtttttgcatattctgccggagggtttgatttctgtgccttcggattcggcgagggcgacttgggtgtcgaaaatgtttttgaaggatgagagtttgtctggtagtgcagagtattcggtggggttgtacaggtgtaggtcgtattgttcggtgatgtggtgtatggcgcttccggcgatggtggcgtaccaggtgtggtgttgggtgtggtagccgtgggagaggcgccatttttctccgcattcggcccactgggtgagtgaactgtaggagatgtggcctggatggtcgatggtggatggtttttgtgctaggggcattactggtcgcctttgtgggtgttccatgggttgcgggtgtcttggccggcatcgtgttgctggtaggcgaggagtgccaagcagtgccaggcagcatgtgccaggtgcggcaggtgtgattcgtggtcgaggttgttgccttgctgccatgataggaggtgccggtagagggcgtcgacactgtggctccacggatagccgccggtccagttgttgtcgccgtatttggtggcaccgtatccggctacttcgcctagggcgtgcaaggctgtagggtcgatgagggatagcctgcagagtttcaattcttttcgggcaccggtgttggggtcggtgtatatgcgggtgggctcatccatggggtgtgtgctccttgaagggtgggttactggttgttgtcgtgggcgagtgcgacggcgagaataatgatggcgagggtttcggctatcagtatgggtgttgtgatcatttggtgtcgcggggatggtaggtgagggttgatgcgcctagaagggtggcgagtgcgcatgcggggatgatggcgagggataccttgtgtgtggtgccggtggcgtacatccatacgatgatgccgccttggatccatgccagtgtggtgaagaaggtttcgtagctgtgtagctcaatgttgttgttgggtgtgttcatgcttgctcctgaagaatggtgttgatggtttggtagatgttgtgcaggtctgtttcgatggataggagttggtggatttcgtggtcgagatcaatgtttgggttgagggtgttgaggcgggatgcgatgtcggtggctgtgcgtagtgtgccgccggtgtggtgaatgatgtgtgccgtgtcggcgagtccggtggtgacagcgtagtgggagaggagaggcatagcggggatgctccttggcgggttactgttgcgggttgatgttgaggtcggcgacgtgcgggtggtcttctgttccggtgacgaggcagtggacggtgactaggagtttggatgcgccgggctgtttcgcggttgcgccgtagacgatggagaaggtgtctttaccgatggttttgtggagttggaggtcgatgtcggggttgccgttccagttgacaccgtgtgcggcggcctgttgttcggctttgcggttgcaggtgtgtgctgccgtgatcatggtgagacccttgctggtttcttcaccccgtgcttgggcttgccggtgggttttggcctgttcggcttgtagggagcggactgctgcggcctggcgggctttcttttcggctttgcgctgttggacggttttgggggtccattcggtgttggctgtggtggcttgctgtgctggctgtgaggcgagtggcggattgttgtctggtgctggcaggaatgaggctgcggcgatgatggcggctgtggcgccggcgacggtgttgcctgttttcttgttcatggctgttgtcccctttccggggtgttgttcgttgctgacatgattaatcatggtgtgggcggtggcccatgtcaaggctgcgctcaacgattgtgagcgtttggtgtgtggctaggggttttatcggctgtacagggtgaggaggtggccaacattgatgcgggtcacgttccagtagagttgtgtcgcctccgtctgtgtgagtggcttccactcgtcgtgactgtacacggtgccgtcggtggcgatgaacgtgttggggcgtagcttgtggagttcggcttctacgctctgccggtaggcttcggcgaggccctcaaaatccatgtggtcgcaggagaggttttcgaggcgtgtcaggtcgaagggtgtggggcagtcgtagctggcgggggtgtagagctgggtgaagtggttggcgatcttttgcatgacgggttccttttctcgtgtggtggggtgagagtttttatcgtgtggcttcggcgatgatggcgtcgaggtcgatcatgttgatcatgtcgtggaggtgttcagcctcatctggggtaagtggctgccagtcctggggtccgtatatggcgccgtcgagggtgatggtccataggggccggatgagtcgtatggcttcttcgactttggcacggtataggcggcagatgatagacgtgtgggtgttgcctatgtcacatcctgccaggtgtgtggggtggagtgggttgatttctgtgggcccatagaggccggtgaaggatggtgtgatgagtgtgccatccatgagggtgtgctcctttcggtggttgtgggggttgttgtggtttctagagtgtgtaggctgcgaccgggagtcaaggctacgctcattcggattgagcgtttcgtggagggtgtgtcgggtgtgacagatgtcacttaagcatttaccgcctctctcagcgcctcaaatcatgtgggggtaggattatgcagggttgaccctgctgatcgattctagggcccttctagagcgtctcaggggtatgtctgggtgatagcaggtccagtagatctaccttggctttcatcatgggggtcgagatgccatatctggacatggaatctaaaccctcatactgtgtgagatgtatcacactcgcctagtatggtgtgcaccctcaaggttactccgccgatctggcgtggagggtgtagcccagaaataccgtttaaagcctccccatggcgcctaggagcgccttgcagggtgggggctaggtattcatacccccaagcaattctgatcgattctagacgcctccaggaacctgatacgcgatcaaccatctcggcatagaccatcagcccctatcctggttagctaagcctcaactatgtggacagtgttggatgctaggggggaagaaggacacggtaaaaagaagagggggagcatcagccttaaagccttaagaccttaacgcttatcaccgagccccctcaagggctcggcatcagcccgaacaggctcagccgatcaggctcagccctgaaaagggtacacgccatcagggaaggcttgagagtacgaggagccctagcgacgagtactcgaaagcctgagggaacaccctcagcactgatgggcctagcgtgttcggaaaggacacgggtcaaggtgtgacagctgtccgggagtgaagcccgttctggctaggggtttcagccttcatcacctgtaaaggttacaagactctaagaaaatttaaggaaaagtttaggtttaatttttggacctttactaccaaaaacacccgtttacacccctcaaacccgcctatagagccaaaaccaccattttgactcatcccaggtggggtatgctaggctggacaggtagccagctggacgcaaggccgaaatccgctgacgcggctttcacccttacatccatcagtctaccaaacactttaaagcttcaaggctaagcgctaagcccttaagaccttaacacttagcaccgagcccctcaagggctcggcatcagtcttaaagccttaaacacttaaagtacatataaaactttaagagcttcacacttaaagttataaataaacattaaagctttaaagtcttaaagtacatatataaccttaacagttaaacgtttaaagctttaaaccttaacacctaagttaagtataaaaccttaaaggcttaacacttaaggatataaactttacatcagtgtttaagactttaaaacttaaaataactattaatacttaaagacttataagctttaaacacttaaagtaactataagactttaaagaccttaagtacttaaagttaaccatcagtcttaatctttactatgataacctataagtcttaaagcttataggtataataatataatataatttataaaagtttttgaagagctaagaggttaacttctttacttctctactctctttggttctttctctcttctcttcttttcttcatcaggggagaagaggaaccttttaccgtcagcgctgatgggctttcaccgtgtgactcgtgtaccaccggtcgcacgctccccacactcttacattcgtgtccctttcaggcttagcgtgttcggctgaaggcgtacggcgtgtcacgccaacacccttaacaccgggtaagacttaaagtgtatattatatgtagaagactttaaaacctctaaggtgttcccgcttagcctgtgtccttcaacgctaggcgccaagcgctaagctgtgaaacgcaaacacacatccacctccatttttctttcgtgtccttctcttttttgacacagctggggggcgatgtgatctttttcacatgccagggggtgtgaggggaaaacaaccaccccagcacagacagaacaccccctcaaacgaacaaaacagcccccagaatcgatcagcagggcaagggcagggtattcatacccccagacgattccaggccgttacaggagcaatgagaggctcacaggggcaaggggagatcaggggacgtgatggcacacaccaaccgcaccgcatccgcctcacaccggcgctggcggcaacgactcatcacccaagcccaacaacaaggccaaaccgaatgcccactctgcggagcaaccatcacctggaacacccatgatctaccaacaagccccgaagccgaccacatcacacccgtcagccgaggaggactcaacaccctcgacaacgggcaaatcatctgcagaacatgcaacagaagcaaaggcaatcgcagcgaaccaaacatcaaattccaacaacaaaccacaaaaacattgattccatggtgaaaaaacccacaacccccaccgggcacaccccctgcacaggcgtgcaagacctcgtacggcttagtgaaatacctcccttttgtggatttgtctgttggtctacatttgtg

SEQ ID NO: 72 - DNA, 19889 bp, Pahexavirus sp.
  source 1..19889: mol_type = genomic DNA
cctctaagctatccggcaccgtcccagtacacggtatatcggacagccatccatcatcctcgagcacacgtttagcccacacgcgaggatcaccgtaaacgatcacgacgcagccccaatcgaccgggccaacgtgccatgcttcgcctcaatacgcttcccacccctataggtggtaccaatcctcgccacagcctcaacacggtgaacctgcacctccgatgataaccctgcacgatattgggccttatcgaaagcgttaccgcccacattcgccgaggccgcacgcttgacacgctcgccacgctcagccaacatgccctgcactccaggagacttcaacacctcacgaatacccggcaagttcagcttcacattcacatcctgagccacaacccatcagcccttcttacgcttcacattgatctgcgtgcccgcatcccaaccagacattgggtgatgccagacgataggagacccgtcagcctcccacacaacaccccgaatacgccaccggcaacgataaccggcacccacaacaggctgcttaaaaagcatcgaccaatgctcatagtcagagtcacgccctgcggcctcatcctcctgcgacacggaagcatagatggccacattatggaacacggtttcgacaggcttagaccagtcttccaccttgtcgccaagatcatcgacacgaacagtcggctgaagcattacaaccgtttcaccgtaaggaaaactagtcatatcatatctcccacaaagggccagcgtagccgttaatattcgacccgcacgaacaaccctcaccccacaccgtggaacacacctcagaatcattcacactactcctcatggtcggtgtgatagtgaacgctttaccagccccaccatcaccctcacacaacttcttcaacgcagcaatctcagaaggccacaacaaattagtgggagtattagaccgtgtcgtctgggcgaaaggacccgcagactcatactgcacctgacccgacacgccagtatcattccagcgcagcaaagccctacgcagaatagccttagcggcatccttgtatgtgaaatccggtttagcgatacagggggcgacactgacagccacagcctccacatcggcaatcatcgcctcaagcttctctctaggaatatcggcgaaaggctcaatatcctcaggcttcaaaatgatacccatcaacaccaccccctgcacatagtacacattcgcttatcttgtatcagttaccagccggaggattaggctcaggcttcggaggattcggggccggaggaggagtcggtgcagccttctccttcacaacagcaaacgaatcaagcgactcgatagccacatacaggacagcctcggcacgaaccataacctcattatggcccttcaaatcgcggccagtctgattcggatcaccatactcgatcagctcgatcgggaaattacgctgaaacccccaatgaacacgagagaaatcaccaacaatagccttcacacccgaggtaggcgacatctccggggcgccagaaacagtcgaagaagcaccaacattcaggccacgccaattatccaaaccggcgaacccggcggcaggatacataggctggccggcgagcggagaccccttcggatacacctcagtagacagggcaaacgagaacgccggatccagggcgaccccgttacgaacctgcaaaccggccccagcgataaggccgacagccttaacaagatcggtcgtagcgctatcggttgcatcaaccgtcttcttcgtcttatccagcgacaccttgacagcagcagcaggcttacccgtagcaggatcaataccatggaaagcaatcagatccacggcgcgaccaatcgaagcacccagggcaggcgaaatcagatcctgcaaaacacccagacggtaatccgcgtcagcccacataaactcgtccgagacacgctgctgagtcgcaaccttgataggctgcgcagtaaacgccgaaacatcaacagacgcggaaggcttaacctcgccctcaccaacaatcttggcgcgaggaacacccgaaaacacggcacccttcacagggccgaaaatagtcggctgctccggcgacagcttcgccaaaacaccagaatcgatagcacggtcacgaaccgcaccaatcatagaaccaggaagctcaagcttccctgcagaaagaaaatcatcagccatcacaaatcatctcctagaattattgacaagagcatcaacaaaagcgacaccctcacgtcgtttaacatcatccacgggggcactccccgcaagacggcgcacacccgcaccgccactatggtcaatcaaacccttcaaagccttagcagactccaccaaagcctcacgatcactaccgtgcaaaaaagctacagcatcagctgataggccacactcggcagccacatcacgcttcacaccctcaagaacaaactcgttaacacgaccctcgagttcctcattcttgcggcgaagctcatcaatagtagatccagaatcgtcactcgatgtacgaagcttctccaactcggcgaaattacttttagcacgagactcccacttgcgggcctcagccttccaatccgtgccagaagaagactcctccttcacggaaacatcaccggcatgatcatcgccggcagcctgcccatccttcacaacatcaacaatgtctccaccctttccgggctcaacagcatcattgtcaacattctgttcctcaacactctgatcggccatagcctaacccaacactccttgcggaaaacaacacaacattgttgacccccgtgcgggagacaaccctgtgcaccgataaccggcagcgcacaaccggaaaccacatcaaattatcgcatatcgccaacggtacgcatagccttcaaaatattgccaggcgactgctgcaacccatgatcatcaacccactcacgagccttctcatacgtcctctgatactcggcatcagccctatttggctcccaagggccaacaacctcaaccaccgtacaaccacaatgatcatgatacttcgcaccaaacggacgcttaccaccacgcctatgacgccgcgtatggccagtagtgagtgccctttccttagtcgtataatccgacctcgtagccaacatggcacaaaaagcacacggatcaccatccgtcaccctgcgccacgacctaccctgcgcacccgcagaccactcaaccgtgtcacgaccagcattcatgacagcccgattaacacccgccgccatagaatcaatagtatccttcgccctatccgggtcactattcatcatcttcatagtcgaaaacgacctagccaacgcggcggcagcatcaaactcgtcatacacgatcgaaccaggatcgacaccgttaagcttccgaaaatcggacacgaatttgcccgccaacgccgcggaaccgtcatggccggcacgctccaactccacacacaaacgcacatactgcgcatctgtcatcttcccggaatgccacaaacgaccaagctcggcataatagcccgcatacttcccggcaaacctgaccgcctcacgctgatacccggcagcagccaaccgcgacacgacacccgaagccatcacctatcaaacctcgttcgtctgccgcgatatagccccagccagcgccgccaaaggatccgaagactcggcacgatgacgcatcacagcctcaacctgcacatcatccaaacccaacatctccaacaccgtacgagaatccgccggaagaataccggcacccacaagcttcgtcacagcatccgccgtagcagcccgagtcggggttgaagcatcacgccaacgcaaacccacatcaccgaaaaacgcggcctcatcaacactcgaatcaagcgccctggcagccaggaaaccaaccgacagccagccctgaccaaacgatgtttgacgccgctcggcacgcttcacaagccgagattcctcggcagccaacgcctccccactaggtgggtcagacgtgataaacccgaaatagcgttcaggaaccgcagcctccccagccgtcaactgcgccaacagccgcatctgatccgaatacggcgtaggactattgacaggaaacgaccccacattcggggtatcaccgtcatcatccttatccacagcccacacagaagccatcgacaggacccagccaggctgcgaaaactcgtcagccgacacaccagtcacccacctttgcgggtaggcatagaagtcacgattcacagactggcccaacagtgtgcgcacagcctcatccgtgtaagccctaatagagcgggtaatctccgaacggccatcaatcctcgacgtcctgcgccgattcacaacaggcaccaacggaaccgcacccaacacattcggtatacggcccgtctcaacccattcacgcgacccccgccgctccacctgaacaatcacatcaggcaacaaaagctcagcctcaacaacctcaggatcacacgtctgctgcaccacaagaccagcatccaaacgagacccgtcagccgaaaaccggcccgtgcaattcttcggcgactgcggacgaaccaacaccgacccatcatcctggggaataacagccacaaacgacaaaccaaaaatcagcgcatccaaatgcacatcacacgacgccgtagcaagccgattcgcagcatacacgccatccaaaccgtagccgtcaccattcgtccagccaagccaatccagacgctcctccaaagcatccacagctataccaggccacgacaccacagtctgcacacgctgcaactccggaggaatggccacccccaaatcacgcacccgattcgaaccctcatagtagccctcaatacggcaatgccacgaagacaacctttgaatccgatcaaacatgccctcaatccaagccaactcatccgagttcataccacagacacccgcttcctaccactacgctcccgacggccacgacgaacacgcttagcccccaaaaacgccaacgacacagcctccaaaggaacctcagaaccatccttaaacgtcgagccccagccccacgcagagcctttctttttctgcacagccgacctcacagcaatatccaacatgtcacgcctcgaatcggcacgaggatgagaaaccacacccgacctgacaccccccagaaaagcctgacacgcctccacatacacaccagtatcagccacaatcacgccacggcccggaacaccacgatccgtcaacgctttttgcaggagcaccgcaccagacccggcaaccatgatccggtcagtatcaccccaacgcaacgccaaccagtcagccaaccggcccacaccatcaacaatcgtccccgacagcccatcaataacctcaacatgaacaccagcatcagtcctgccggcaccagccaaagcaacccgatccccagagcgagaaaacgagacaccaaacactttcccgccaaccagagccgcctcatccacagccgactggacccacttatcagccggaatcaccgacgaagcagactggccacgatcccaccagccaagccgctcccgagcaaacccggcagcagacatcgactcatgctcatccgagactgtcccaaaattcaggcgacgccccaacgccggattagtatcacccgccaacttccgccactgccgcgacacatcatccggatcagactcgtcaggaatcgaaaactccgtccacgcaaaccttttaccacccgacaaagcctgcccacgcaaacgcaacaccacagacccgtcagccaacggcccaggcggcgtgcccaaaaaaatctgctgcggatcaccagacggggcagcactcaccgtaggaagcaaagcctccaactgctcatccgacaactcctgagcctcatcacacaccaaatcatcaaccgtaaacccgcgagcagaaccacgagaacgggccacaaactcgacagaaccccaacccggacaaccacacttacgctcaaacgtggcacaatccggatgatgcaacacaatagcctcctgaccattcgtcgcacgaatcgacttcaccatacgatacaaatcaggaaactgccgctcattctcaaaaaatgacctcaaccgcataaacgccttacgagccgatttcaactcgtgagcagtatgcaaaatacgacgaccctgaatagtcgccttaaacaactccacaacctcaaggatcgcgttcttgccattctggcgaggcacaaacaccccacacacacccgaagcaagcctgccattaccaccgacagccagccaatcatccaacacctgctgctgccacggatcaggcgtcaatccatacgcacgacccaactccccagcatcacccccagcagacaccgaatacgccgcagccacacggtgacgaggaacctgagacccaacaacaccagacacctaatcaggcccccttgcgctacctataccggtcaatcatcgccaccgcagaacccccaccacggccaccagacaccacatcaaccgaatacctatccaacatgcccataaaagccttcacatgagcacgaagcgaagccaccaaatccgcgcgaccctcacgccacacacaatcatgaatcaccgcagcatccatgagaaacaaccactcctcatcagacacgtactgcgcgcggctatcctcaccccacacacgccaccaacgacgcgtctccccacaccaatcacgactatcaggaagctcaggctgcacaacactcaccaccaacacaaaaagtcgacaaacagacaaaaccacaaaagggaggtatttcactaagccgtacgaggttttgcacgggtgtgcagggggtgtccccggtgggggttgacaggtttttcaccatgggatcaatgtttttgtggtttgttgttggaattgaatgtttggttcgctgcgattgcctttgcttctgttgcatgttctgcagatgatttgcccgttgtcgagggtgttgagtcctccccggctgacgggtgtgatgtggtcggcttcggggctggttggtagatcgtgtgtgtcccaggctatcggggttccgcagagtgggcattcggtttggccttgttgtcgggcttgggtgatgagtcttgcccgccagcgccggtgtgaggcggatgcggtgcggttggtgtgtgccatcatgtcccctgatctcctatggcccctgtgagcctctcatggctcctgtaacggcttgggaaccgttgggggtatgaataccttgcccttgccctgctgttcgattctgggggtttttttgttcgtttgagggggtgttctgtttgtgctggggtggttgttttctccactacccccatgggtgtgaaaaagatcacatcgccccccagctgtgtcaaaaagagaaagacacggtaaaagaaaagggggggtgggtgttcgcgtttccaggcttaccgcttggcgcctagcgttgaaggacacgggctcagcgggaacacctgacaggtttttaaagtcttctacatataatatacactttaagtcttacctggcgttaagggtgttggcgtgacacgccgtacgccttcagccgaacacgccaagtctgaaagggacacgggtgtaagagtgtggggagtgtgcgatgggagcttgcgaccagaagcacacgagtcacacggcgaaaagcccatcggcgctgacggcaaaaggttcctcttctcccctgatgaagaaaaaaagagaagagagaaagaaccaaagagagaagagaagtaaagaagttaacctcttagctcttctaaaacttttataacttataagctttaatacttatattatattattatacctataagctttaagacttataggttataatattaaagtttaagactgatggttaactttaagtacttaaggtctttaatattttatagttactttaagtgtttaaagctttaaggttttaagtattaatatttactttaactcttaaagtcttaaacactgatgcaaagtttataaccttaagtgcttagcctttaaggttttatacttaacttaggtgttaaggtctttatactgatgctgagccttgaagggctcagcgctaagtgtgtaagcctttaaggtttatatgttatcttaggtgcttagctgttaaggttattaattaactttacgtgttaagctcttaaggtgtttaaagcttttatagtaatttaggtccttaagggctaagctcttaggactgatgccgagcccttgaggggctcggtgctaagctatcagcaccttagcgctaagccctgaagctttaaagtgtttggtagactgatggtaagcgaggttgggaagtgcgttagcactttccggccttgcgtccagctggctacctgtccagcctatcataccccacctgggatgagtcaaactggtggctttggctctataggcgggtttgaggggtgtaaacgggtgtttttggtagtaaaggttcaaaaattaaacctaaacttttccttaaattttcttagagtcttgtaacctttgagggtggtgaaggctgaaacccctagtcagaacgggtttcactcccggacagctgtcacacttgacccgtgtcactttccgaacacgctaggcccatcagtgctgagggtgttccctcaggctttcgagtactcgtcgctagggctcctcgtactctcaagccttccctgatggcgtgtacccctttcagggctgtgcctgctcgggctgatgccgagcccttgaggggctcggtgctaagtccatcagtgctaagaccctaaggctgatgctcccccttctttcttgtaccgtgtccttcttcccccacagtatcccacactgtccacatagttgaggcttagctaaccaggatagggactggtgatctgcgtctggatggttgatcgtgtatcaggctctgggaggcgtctagaatcgatcagaattgcttgggggtatgaatacctagcccccaccctgcaaggcactcctaggcgccatgttggggctttaaacggcatttctgggctacaccctccacgccagattggcagagtagccttgagggtgtacactaagccaggagagtgtgatgcatctcacacacctagatgatagatctgatgtctcagctcggcatcttggctcgctagatcatctgccatacccgctatcacccagacatacccatgagacgtcctgtatggtgcctagaatcgactaccagggtcaaccctatataatcctacccccagaagatttgagacgcttagagaggccataagggcttaagtgacatctgtcacatcccatgccacactcatatgaaacgctcaatccgaattagcgcagccttgactgtggggtcgcagcccgcacactctagaaaccacaacaacccctacaccaccgaaaggagcacaccctcatggatggcacactcatcacaccatccttcaccagcctctatgggcccacagaaatcaacccactccaccccacacacctggcaggatgtgacataggcaacacccacacgtctattatttgccgcctacaccgcgccaaagtcgaagaagccatccgactcatccggcccctgtggactgtcaccctcggcggtgccatatacggaccccaggactggcagccactcaccgcggatgagactgaggaacaccacgacatgatcgacacaatcgatgtggacgccatcattgccgaagccacacgataaaaaccatccacacaccagaaaggaacccgtcatgcagaagatcgccaaccacttcacccagatctacacccccaccccggactgccccacacccttcgacctgacacgcctcgaaatcctctcctgcgaccacatggattttgagggcctcgccgaagcctaccggcagagcgtggaagccgaactccacaagctacgccccaacacattcatcgcctccgacggcaccgtgttcagccacaacgagtggaagccgctcaccggcggagaagccacacaactctactggaacgtgacccgcatcaatgttggccacctcctcaccctgtacagccgataaaacccctagccacacaccaaacgctcacaatcgttgagcgcagccttgacacgaggtccaatcactggaagtattgatcatgtcagcaacgaacaacaccccggaaaggggaacacagtcatgaacaagaaaaaaggctacaccatcgccggcgccaccatcgccatcatcaccgcagcatccttcctcccagcaccaggcgacaacccgccacccgcctcacagccagccccgcaggccaccacagccaacaccgaatggccccccaagactacccaacagcgcaaagccgagaaagcggcacggcaggcagccgccacccgctccctacaagccgaacaagccaaagcccacaagcaagcccaagcaaggggtgaagaaacatccaccggactcaccatgatcacggcagcacacgcctgcaatgacaaggctgaacagatggctgccacacagggtgtcaaatggaacggcaaccccaacatcgacctccaactccacaaaattattggcaaagacacgttcagcatcgtctacggcgccaccgccaaacaggccggagcatccaaactacccgtcaccgtccactgcctcgtcaccggaacagaagaccacccgcacgtcaccgacctcaacatcaacccgcaacagtaacccgccaaggagcatccccgctatgcctctcctcccccactatgctgtcaccaccggactcgccgacacggcacacattattcaccacaccggcggcacactacgcacagccaccgacatcgcatcccgcatcaacaccctcaacccagacatcaacctcgaccaccaaatcaaccaactgttatctatcgaaacagacctgtacaacatttataaaaccatcaacaccattcttcaggagcaagcatgaacacacccaacaacaacattgagctacacagttacgaaacgttcttcaccagcctagcctggatccaaggcggcatcatcacatggatgtacgcaaccggcaccccacacaaggcagccctcgccatcatcgccgcatgcgccctcaccaccctcctaggcgcctccaccctcaccaacaacccccgaaacacccaatgatcacaacacccatcatcatcgcagaaaccctcgccatcatcatcctcgccatagccctcgcccacaaccccaaccagtaaccccacacgcaaggagcacacaccccatagataagccaacccgcatatacaccaaccccgaaaccggcgccaagaaagaactcaaactctgcaggctatccctcatcgaacccgccgccttgcactcgctcggcgaagtagccggatatggtgccaccaaatacggcgacaacaactggaccggcggatacccctggtgtcacagcgtcgacgccctctacaggcacctcctatcatggcagcaaggacgcaacctcgattatgaatccgggctaccccacctggcacacgcggcctggcactgcttggcactcctcgcctaccagcaacaccaggctggccaagacacccgcaacccatggaacacgcacaaaggcgaccagtaacatgcctctagcacaaaaacccgctatcatcgacctacccgaccacatctcctactcgtcactgacacagtgggtagaatgcggcgaaaaatggcagctcatgcacggctaccacgccacagcacacacctggtacgccaccatcgccggaagcgtcatccacgccatcactgaaacctgggacaaaaacctttaccaccaaaccgatgcggatatcccaccctttggcgacctgttcaccgaagagatcatccgccaagtcggtgatggcgaagacattcgcccctccgggcgcacctgcaaaaccgtctgcgaaagcggaggacccaacaaaaaagactatgattggtggatgcactacgggcccatctacgtggacaggtggaccacctggaggaagaggcacaccgaatacgagatcgccaccatcgacggccagcccggcatcgaataccccgtcgaagccaccctcaaccatgacacccgggtcgtaggatacattgaccggatcctccacaacccagccaccggcgaatacaccatcctcgacctcaaaaccggggccataccgcaaggaaacctgcaactctacacctacaggcacctaatccacctcaagaatgatatacagccggcctatggcatgctttggacacccagccacaaaacagcctccggcgacaaggacaccggatacgatactgggcccatcccgctcgacaccgaggctgcacgccacatcggcgtcatgtatactagcgccatgcaaggaatcgcgaataacgtgttcataccccacgtcaccccgatgtgcaaaggctgccccgtccgagactcatgctgggcctacggcggcccgcaagcctaccggtatcccaccacaaccatcacccagccacaacatagcaaagaagataaggagcaccagtgaacgacaacacagacgacgaccgatacactgtcaccctcaaatacggcggcgactacgccgcaccctggactgtcattaggggagacaccgccaaccaggtgaaacaggccatcatcgacctgctaggcgggctcaaagacaacaccgtctccgaggattgggacctagccaccctggtagcatccgcatccatcatcctccaagaccgatacaaccaggccgccaaagactacgtagacaacatcgcatccaacgaaaacgagattattatcgaccagatcaacaaggccactagcaaggcacagctagcagacctcctcaaacaatacaaaaagaccatcacgagcaacagtgacgtgtccgaagccttccggaacaagcgaaacagcctcacccgataaaaaccgacacaaaccaacaaaaagaaacaaatacaaacagtaaaggaaacactaatgggactcgccaactaccgcaacaacagcaacagcacctgcttcaacccctcccgaaaccaggacgccaccgccatcgccttcaaagtccacgacgtagaacacaacactgaaggctacggcggacaaacagcagaccgcatctacgccgacgtcaccatcttccacaccctcgaggatctcaacaacggaaccccagaaaccatccccaacgccattattgagaaagtgcgcggcagcaacgaccgcccacactccatgatccgcgacctcgaagcctacctcggcgaagaacaagccttcaaactcgccaccgtacgcaccaaaaacggcttcaacgcggtcatcctcaaaccattagacgacgccatctacgacaaggttgccgaatacgtggacaagcgcgataacggccagctagacgacaccacagcccctacggatgctgatatcgatatcgactccatctgaccaccaatacacatccaaccgatagatagataaggtcccgatgctctctctccaaagatccttcgagagggcctcccaaacagccgccgagctgccccgcataccccagctagaacccctctaccgcaaccaggacatgcacatccacaaaggggacctagtcatgatcgcggggcgctccggcagccaaaaatcagggctagccatgttcatcacagccatgctcaaccagcccgccctctacatatcaggggacatgaccccctgggaggcctccacacgaataatctccctcaacacccaacacaccaccacacagatacaacacaacatcgacaactacgggccagaatactatcgagacaccatccggcacagcgaacgcatcacattctcattccagtcacccatcacctggacagacatcaccatggagctacaagcctacatggaaatgtggaacaccttcccaccactcattgtcatcgacaacctgatggacatccaagactgcgagagtgactaccaggcacagcaagaagccatgcaatggatcacagcattgggcagagatactggctccaccatcatcgtcacccaccacgcaaccgacaaaacaggaaccgacatcgaacaccccccggcacgccgcgaaatcaaaaacggcctctccgaaaaaccacaactcatcctcggagtctcattgtatggtggcgaagacaacggcaacgggctcacgatcccagccgaagcccgcatcgcagtgttgaaacagcgcaccggcaaatccagcccagacggaacccgatacgaacgactcagagcctaccccgaatacacattcttcgggccactcgccgaaaaacagccatggaacatgaccacaacacacaaaggactatcatgtcaacacaacaggcacgcaaccgccgcgccggagccgaatgggaaacccgactcctccaccagctacgagacaccggccatgatatagagcgcctccacctcaacggccgagaggacgaaggcgacctcatcctcacaaccggcaacaaaacctatgtgatcgaagccaaagcggggcagcagcatctagcccaattcgtcaaagaagccagccgagaagcacgcaactacgaaacacatcgaaaccgcgaaatccagtccaccatcggactcgtagtgatgaaacagcgcaacaaaccctggagcgaagcctatgtggtatcaaccctcaacgagctcctcccacacctctgacacccgccgcctcctcgacacccaccacatccgctacaacccgtccaaaaacgagcaacacatcctctgcccgttccacgacgaccaccagccctccatgagcatcaacctcgacaagggcgtctggtactgccacacatgcggtatcggaggcggactcgccaaactacaacaacgattagaagaagaaaaaccgaatgtacgacagcatacgcccatacaacattgcggaacgccgccgaatccagaaagcctcggcccgctacgaaacccacctcgaaaacatactcgacctcctctcagcaagaggcatcagcgaagaaacagcccggctccaccaccttggatacatcgataacgaccccatccccggccacgaaggctacaaccagtgcatcaccatcccctacatctaccccgattggggcggcccagccgaaatacgaaaaatgcgtttccgctgctcacccccccatgattgcaaaacccacaaccaccccaaatacctaaccccggcaggagacacaggctccatctacaacatggccgccatggccaacccggcagccgaaatgcacatttgcgaaggcgaattcgactcaatgattctcgaacaatgcggatggcccgccgtcgccctacccggcgccacctcgtggcaaaacttttggaccaaattcttcgaaggctacgaccgcatctacatctggtcagacccagacaaagcaggcgaccagatggcacaaaccctccaaaccgcgctgtcgcaagccatccacgttcccctcactgtcggggatgtcacagacacctaccttcaagccggcaaaacagggttgacacaagccctcaacacagtgctacaataaaaccagacaaacaaccacaacacggaaaggtacactaaaacatcatggatcccctcgacacctgccccatccccggccgccgcgacacctccaaggccgccaggagacgcatacgcctcgccatctgtgcagaaaaatgggccgacggcgtggacccactccacatcatgcacacctggggcaccacctacgacgggatgcgatccatgatccgcgccaaccccgacatcaaactacccgatgacatggccaaacggctacacaaaatctgccgggaagcctaccccaaaaaccagcccaacaggcaccgaagcggatgggacgcctacgagaaaaactactacacggaggagatcctcttcctcggccagttcaacgtgccagccctcgaaatcctcaaccggctcgacgtatcatggaccatgtggaaacaaatcatcaccgaaaaccatctcacccggctacaagacgaaacctacaatgcgtgccactggtattatctgaaacagcaacatccagactggaccgaccagcaaatcacacaagcccaacatgccgggaacaacaccttcaaccagttcatgcaagacgacaggcccgtactgtgagcatcgcattcaaacccaccaccaaagacaagcaagccatacgcagcatcattgtcgacgcgtggctcgacgaaaaccaagtacgagacatgcccgacaaggtactatcacacatggtggaatactgctgggggcgcttcacagacaacaacaggtacgctgtagctgcccaatattggaaggggccacacaagcccgatagcgaccatcaacggatcattgtaggctacttcaaaaccatcaaacaagccacgaacgccgccaaacaattccactggaacacacggctacaacaacaatggaaaacatggatactacccgtacacaacggcaccgtatccgaacatttcaccaaccagtaaacactcttcgacacacaaaccagcaaccaggatgacagtgtactgcccgagcacttgcgtgacgtcatgtgcggcaaaacactcaaccacacagacggcaccatcacatggtgcacccgcaaaccaggacacgacggcgactgccgcaccggatggcagcccaccacacaaccgataggatatcatggcaacaaaaactgaaacccttattcaacgctacggggctaaagcagccgacgtgctcgccgacaaaaccatccccgcctcgtggctagcaaaacaactcactgaagccggataccccatctccgccacagtcatcaaagactaccgacgcaaacaaaccaccaccccacaaacagaagaggaggatacccgatgatagacaacatagaccggctcctcacacagctagccaaccacgacaacgccatcgacaccatccacgatgatctcgccaacggaaccgtgcgccgcacacgcatctccgaatggaccctccccaacggagaaacaggccgatccatacaaaaaatcatcgaccaccaaccagcaaccaacccctaccctgtagacgaactcgttgataaactagccgaatggacacccccaaaacccgaacaagacacccgcaccgactacagcactgcagccttcgtcatcggggcaggagacttccaaatcggcaaaggcatccccggcggagaaacagcacacttcgccgacgactatttgcactccctcatagtcgcaaaacactactggcaacaggcaggcaaacccgaacgagtccacatcgccttcctcggcgacatgatcgaaggatacgtgtcacaaggcggcaacaacgcctggcgcacacaaacacccttgacggaacaaatcaggctcacccgcatggccatgatgcaactcgtccacatgttcgaccactgcgccaacgtcaccatcacatccatcccaggcaaccacggtgaagcagtacgattcggtaaaggcgtcaccacctacgacgactccttcgatgtagactgctgccgcgccatcgcagaagcctaccagctcaacaaccaatatcccaaccttcacttccacttccccagccgagacgaaatgaccaccaccgttgatgtggccggcacacaaatcctgcacgcccacgggcaccaatggcgcaacaaccaacactacgaatggtggcgcggccaagaattccacaacggaaccacatcacacatcctcatggcaggacaccgacaccacctagaaatctccgaacaaggacaacgcaccttcatccaatgcccatccatggaaggagaatccgtctggtaccggcacaagacaggcaccaccggcaaccccggactcgtgtgctacactatctaccacaaaacaccaaacaactaccaagtagccagataaaagagatgccatgagtagacgaccaaccaaagtccaacaagcaaccacagccaactgggaatgggccacccccaaccaccaacaccagctacacaaagcctgcaccaacattgcgcgccgctacccggccgtcaaccccggcgacctctaccaagactccctactatatatagcggtacgcaaccaataccaccaactggaaggcaaccagtggacccaaatgtgctaccgtgtagcccaacggctagcaaacaaaacagtccaccacctagacctacccaaacccgtccacgaaatcacagccatagccgacaaccaaaccagcaactaaggaaaaccacaatggttaccaccatcctcgacgacggaacccaaaccaccaggctacaaaccgtaggctccaccaccacagccatcatcaccaacaccgaaacacccgaaaccatcaccgccaaatacaccatcgcaaaagacggcacagccacctacagcatcagcggaaacacctacctgggagaccaccaacacatcattaaactcatgtacgactactgccactgcgtcggacgattcgacaccaccaacaccagcaacccagacaacctcgacaacctgttcaagggatgacacatgaaccggacctacaccaccgccgacatcattcaagccgcgcaatggatctggaactgcggtccatggaaaccgtccggcgagccgggcatgccacccccaccaaccgcgccacaacaccacggcaacaacatcgtctccatgatcgatttgcagctagccatcgacgactacaccctcacctgccagccatctaaacagcgaaaacatttggcacggttggcagcattccgtgaagtatacgggtatgatcaaacctattcggtggcagcccaacgactcggggtgacaagacaaaccgtgaaacagtgggcagaccaaacactgatgacgttaaccgagtacgcaaacagcacatactacatgccagacgataacgaaggaatggcataacacgatgaacaacacaaccaacatcccccacaccgccctcaaaacagcggtacaccgaatcatccaacaacagcccaccaacatgcagcaattggaaaacattgttgacagtgtcgaaaaccagtaccgtgtacccatctcactcgacaatgtgaaccttaccgtcaaagaagtcagcctcgacgatctcgctatcgaccaggacacgctagacgagtgcagcgaaatcctgtgggactgcgacagtgcaggacacccaaacaacagcaacacccgtggcattccagacgacacacgggcaagccaggaagccatagattggctcgccggaatcgcataccaggccaaactattgcaagcggaagccgacgatatcatgcagtctatcatctgccaccgcgacaattataaaaatgttatcggccagaacgttctgcaccaggccaacgatactatctccgcctgcctccacctggaccagctgatcgaagacacactagacgacaacctgtaaaactcctgtagacacaaaaatagtgccccagcagcaaccaccacacaatcgtggcagcaccgctggggcacacatctatattcacttgtcatccgatcggctctaccgtgccaacctccgactcggcggcacgccgaggctcatagccggcaaaaccatgcacatcatcagaaggcacgatcatgccaggatccgacacaacaaacaggtgagactcaaccaaac

SEQ ID NO: 73 - DNA, 7360 bp, Pahexavirus sp.
  source 1..7360: mol_type = genomic DNA
accttggctttcatgacgggggtcaaggtagatctaggcatggattccatgcccctcatgctgtgtgagataggccacactcccctggcttggtgtgcactctcgaggccactctgtcgatctggcgtggagggtgtagcccagaaatgccgtttaaagctgtgacatggcgcctaggagcgcctgacagggtgggggctaggtattcatacccccaagcaattctgatcgattctagacgcctcccagagcctggcacacgatcaaccatctcggcagagaccatcagcccctatcctgcttagctaagcctcaactatgttgacagtgtgggatactgtgagggaagaaggacacggtaaaagaaagaagggggagcatcagccttagggtcttagcactgatggacttagcaccgagcccctcaagggctcggcatcagccccctcaggctcagccgatcaggcacagcactgaaaagggtacacgccatcagggaaggcttgagagtacgaggagccctagcgacgagtactcgaaagcctgagggaacaccctcagcactgatgggcctagcgcgttcggaaaggacacaagggtaaagtgtgacagctgttcgggagtgaaacccgttctgactaggggttttagccttaaccaccctcaaaggttacaagactctaagaaaatttaaggaaaagtttaggtttaatttttggacctttactaccaaaaacacccgtttacacccctcaaacccgcctatagagccaaaaccaccagtttgactcatcccaggtggcatatgataggctggacaggtagccagctggacgcaaggccgaaatccgctgacgcggctttcacccttacatccatcagtctaccaaagacttaaagacctaagggcttagcgctaaggtgctgatagcttagcaccgagcccctcaagggctcggcatcagtcttaaagccttaaacactttaagtaaacttaagagcttagcacttaaagttaattaataaccttaaaggcttacacacttagcactgagcccttcaaggctcagcatcagtataaagaccttaacacctaagttaagtataaaaccttaaaggcttagcacttgagattataaaattaacatcagtgtttaagacttaaagagttaaacacttaaagtaactataagactttaaagatcttaagtacttaaagttaaccatcagtcttaaactttaatattataacctataagccttaaagcttataggtataataatataatatcagtattaaagcttataagttataaaagttttagaagagttaaagggttaacttctttacttctcttctctctttggttctttctctcttctcttcttttcttcatcaggggagaagaggaacctttaccgtcaacgctgatgggctttcgccgtgtgtctcgtgtaccaccggtcgcacgctcccggttgcacactccccacactcttacactcgtgtccctttcaggcttggcgtgttcggctgaaggcgtacggcgtgtcacgctctcacccttaacactaggtaagacttaaagtacatactatatgtagaagactttaaaaacctgtcaggtgttcccgctgagcccgtgtcctacaccgctaggcgccaagcgctaagcctgaaacacccaccccccttttttcttccgtgcccttctctttttgacacagctggggggcgatgtgatctttctcacacccgtgggggtagtggagaaaacaaccaccccaccacaaacagaacaccccctcaaacgaacaaaacagggcctaggatcgatcagcagggcactggtagagtattcatacccccaacacctttcaggccgttacaggagtcatgagaggctcgcaggggccataggtgatcgggggacgtgatgggacgcaccaaccgcacagcatcatcagcccatcggcgctggcgggcaagactcatcacccaagcccgcaagcagggccaaaccgaatgcccactctgcggagcccagatagcctggggcacacatgacctgccaaccagccccgaagccgaccacatcacacccgtcagccggggaggactcaacaccctcgacaacgggcaaatcatctgcagaacatgcaacagaagcaaaggcaatcgcagcgaaccaaacattcaattccaacaacaaaccacaaaaacattgattccatggtgaaaaacccgccaacccccaccggggacaccccctgcacacccgtgcaagacctcgtacggcttagtgaaatacctcccttttgtggatttgtctgtttgtcgactttttgtgttggtggtgagtgttgtgcagcctgagcttcctgggtgtcgtgagtggtgtggggagacgcgtcgttggtggcgtgtgtggggtgaggatagccgcgcatcgtacgtgtctgatggggagtggctgtttctcatggatgctgcggtgattcatgatgtggtgtggcgtgagggtcgcgcggatttggtggcttcgcttcgtgcccatgtgaaggcttttatgggcatgttggatcgttattcggttgatgtggcgtctggtggccgtggtgggggttctgctgtggcgatgattgaccggtataggaagcgtaggggtgcttgatgtctcaggttgtgggttctcaggttcctcgtcaccgtgtggctgtggcgtattcggtgtctgctggcaaggatgctggtgctttgggggctgcgtatgggttgacgcctgatccgtggcagcagcaggtgttggatgattggcttgctgtgggtggtaatggcaggcttgctgcgggtgtgtgtggggtgtttgtgcctcgccagaatgggaagaacgctattttggaggttgttgagctttttaagatggtggttcaggggcggcgtgttttgcatacggctcacgagttgaagtcggctcgtaaggcgtttatgcggttgaggtcgttttttgagaatgatcggcagtttcctgacttgtatcgtatggtgaaggctgttcgtgcgacgaatggtcaggaggctattgtgttgcatcatccggattgtgccccgtttgagcgtaagtgtggttgtccgggttggggttcggtggagtttgtggctcgtagccggggttctgctcgcgggtttacggttgatgatttggtgtgtgatgaggctcaggagttgtcggatgagcagttggaggctttgcttcctacggtaagtgctgccccgtctggtgatccgcagcagattttccttggtacgccgcctggcccgttggctgacgggtctgtggtgttgcgtcttcgtggtcaggctttgtcgggtggtaaacggtttgcgtggacggagttttcgattcctgacgagtcggatccggttgatgtgtcgcggcagtggcggaagcttgcgggtgacactaatcctgcgctgggtcgccgcctgaattttgggactgtaagcgatgagcatgagtcgatgtctgctgccggttttgctcgggagcggcttggctggtgggatcgtggccagtctgctgcgtcggtgattccggctgataagtgggctcagtctgcggtggatgaggcgagtctggttggcgggaaagtgtttggtgtctcgttttctcgttctggggatcgggttgctttggcgggtgccggccggactgatgctggggttcatgttgaggttattgatgggctgtcgggaacgattgttgatggtgtgggccggttggcggactggttggcggttcgttggggtgatactgaccggatcatggttgccgggtctggtgcggtgttgttgcagaaggcgttgacggatcgtggtgctccgggccgtggcgtgattgtggctgatactggggtgtatgtggaggcgtgtcaggcgtttctggagggtgtcaggtcgggtgtggtttctcaccctagggctgattcgaggcgtgacacgttggatattgctgtgaggtcggctgtgcagaagaagaagggttctgcgtggggttggggttcctcgtttaaggatggttctgaggttcctttggaggctgtgtctttggcgtatcttggtgcgaagatggcgaaagcgaagcggcgtgagaggtctggtaggaagcgggtgtctgtggtatgaactcggatgagttggctctgattgagtgcaagtacgatcgtatccaaaggttgtcttcatggcattgtcgcattgagggctactatgagggctctaatcgggtgcgtgatttgggggttgctattcctccggagttgcagcgggtgcagacggtggtgtcgtggcctggtatagctgtggatgctttggaggagcgtctggattggctgggctggacgaatggtgacggctacggtctggatggtgtgtatgctgcgaatcggcttgctacggcttcgtgtgatgtgcatttggatgcgctgatttttgggttgtcgtttgtggctgttatcccccaagaggatggcactgtttctgttcgtccgcagtcaccaaagaattgcaccggcaagttttctgccgatgggtctcgtttggatgctggtttggtggtgcagcagacgtgtgatcctgaggttgttgaggcggagttgttgcttcctgatgtgattgttcaggtggagcggcgtgggtctcgtgagtgggttgagacgggtcgtataccgaatgtgcttggtgcggttccgttggtgcctgttgtgaatcggcgtaggacgtcgaggattgatggccgttcggagattacccgctcgattcgtgcttacacggatgaggctgttcgcacactgttggggcagtctgtgaatcgtgatttttatgcgtatcctcagcgttgggtgactggcgtgagcgcggatgagttttcgcagcctggctgggttctgtcgatggcttctgtgtgggctgtggataaggatgatgacggtgataccccgaatgtggggtcgtttcctgtcaatagtcctacaccgtattcggatcagatgcggctgttggcgcagttgactgcgggtgaggctgcggttccggagcgctatttcgggtttatcacgtctaacccgcctagtggggaggctttggctgctgaggagtctcggcttgtgaagcgtgccgaacgcaggcagacgtcgtttggtcagggctggttgtcggttggtttcttggctgccagggcgcttgattcgagtgttgatgaggccgcgtttttcggtgatgtgggtttgcgttggcgtgatgcttcgacgccgactcgggcggctacggctgatgctgtgacgaagcttgtgggtgccggtattcttccggcggattctcggacggtgttggagctgttgggtttggatgatgtgcaggttgaggctgtgatgcgtcatcgtgccgagtcttcggatccgttggcggcgctggctggggctatatcgcggcagactagcgaggtttgataggcgatggcttcgggtgttgcgtcgcggatggctgctgccgggtatcagcgtgaggcgattcgttttgccgggaagtatgcgggctattatgccgagcttggtcgtttgtggcattccgggaagatgacagatgcgcagtatgtgcgtttgtgtgtggagttggagcgtgccggccatgatggctccgcagctatggcgggcaagttcgtgtccgattttcggaagcttaatggtgtggatcctggtttgatcgtgtatgacgagtttgatgctgcggcggctttggcgaggtcgctttcgactatgaagatgatgaatagtgacccggatagggtgaatgatacgattgatgcgatggcggcgggtgttaatcgggctgtcatgaatgctggccgtgacacggttgagtggtctgctggtgcgcagggtaggtcgtggcgcagggtgactgatggtgatccgtgcgcgttttgtgccatgttggctacgaggtcggattatacgaccaaagagcgggcgcttactactggtcgtacgcggcgtcataagcgtgccggtaggcgtccgtttggttcgaagtatcatgatcattgcgggtgtacggtggttgaggttgttggcccttgggaaccgaatagggctgatgccgagtatcagaggacgtatgagaaggcccgtgagtgggttgatgatcatgggttgcagcagtcgcctggcaatattttgaaggctatgcgtactgttggcgacatgagatgatggtttccggttgtgtgccgccggttattggtgcacagggttgtctcccgcacgggggtcaacaatgttgtgttgttttccgcaaggagtgttaggttaggctatggccgatcagagtgttgaggaacagaatgttgacaatgatgctgtggagcccggaaagggtggagacattgttgatgttgtgaaggatgggcaggctgccggcgatgatcatgccggtgatgtttccgtgaaggaggagtcttcttctggcacggatcggaaggctgaggcccgtaagtgggagtctcgtgctaaaagtaatttcgccgagttggagaagcttcgcgcctcggatagtgattcggggtctactattgatgagcttcgccgcaagaatgaggaactcgaagacaggatcaacgggtttgttcttgagggtgtgaagcgcgaggtggcttcagagtatggtttgtccagtgatgcgatcgctttcttgtcgggtggcgataaggagtcgcttgccgagtctgcgaaagctttgaagggtttgatcgaccatagtagtggtggcgcgggtgtgcgccgtcttgcggggagtgcccccgttgatgatgttaaacgacgtgagggtgtcgcgtttgtggatgctcttgtcaatatttctaggagatgatttgtgatggctgacgattttctttctgcagggaagcttgagcttcctggttctatgattggtgcggttcgtgaccgtgctatcgattctggtgttttggcgaagctttcgccggagcagccgactatttttggccctgtgaagggtgccgtgtttagtggtgttcctcgcgccaagattgttggtgagggtgaggttaagccttccgcatcggttgatgtttcggcgtttactgcgcagcctatcaaggttgtgactcagcagcgtgtctcggacgagtttatgtgggctgatgctgattaccgtctgggtgttttgcaggatctgatttcgcctgccctgggtgcttcgattggtcgcgccgtggatctgattgctttccacggtattgatcctgccactgggaagcctgctgcggctgtcaaggtgtcg

SEQ ID NO: 74 - DNA, 7318 bp, Pahexavirus sp.
  source 1..7318: mol_type = genomic DNA
gcgtaaacgcttcctagaccgggatgtgacagcctgaacagaacccaaaaccgtggcgatagcggtacaaagagaggctacaagcgtaggtgtaaaccatgacactacagccccctaccactacaaccaccacaacacgtcacatatccgcaggccgcacattacacgccgacagcaatccagttagcaacagcgggcacgccattcggcttagacccatcattcgtaataaacgccaactgaaaatccttgctagtaatattgtaggctttcacatcaatctgctgcgtgcccccagccgccgtcgccatagacgccaccacaacaggcgcactaccaaacgggcgggcaaacgggatcgtgtaagcatacacagcagacccgccaaactggatctgcttcgaacccgtctcgatccgtggagacaacaacatccactcattgacatggttagcccacacagcccccgaaggaaccatcacacggtcaccctccattggggtaggatcacacgcagcagactcgccaaacgcaaccctagccgccatagcacgcctatccaactgctgctgcaacccgttagacgacaacaccaaagtcgccaacaactgctgatggtacacgccaggctcagcccttaacacgtcacgggcacgctccgcacgccccccaggaacaatctccaacttggccgtattctgctcccaatcccgagacaacaccacatagtcataacgggtctcgccaggaccaggcagctgacctgtcacagtctcaacactattcgacgtgcacatcaccccgtgagcccacgcctgccccggcaggacctcacacaacactgtggcaccctgaacagtagtgccgacacgaaaatcgtccgggcccttcacagacggcatattacccatcagaccagatatttgagcccaatcatactcggtcaacacaccatcaaaacccttgcacacaatacccacaacacacccctaacaattagaacttttgcaaatcccgcacacccgcagccaaaccagccacacgccgcgccaacaacgccgacggattatcctcataatcccccgcaataggagtcactttcgtccacccgtcaccaggcgaatcacactccacatcaatctgccgcacaatctccgcaataggccccgaacccacatccacatagataagatcaccgggcatcaacctgcctggcccaaaccgcaacacatccgactccgccagctcaatcttaaaccccgacgtggccccagactcttgcagcacccgctcagcctcatcggcaagaaacgcatcctcatccgtgttacgggcatccttaaacacctctacacgatcaaaccagtcatcctcggccatcgaatcaacatcctcgcaaaacagccgatccttgccctcgccgcggccaccaaccaccaccgacgtcgccttcggggcatccctcacatactcccacgacacaatcgaacccgactcggcagtcaacacatgcttacgcgtcacagcaggcacacaatcaaacagcaaaccacgctgatcaaacttcgcattctcaaactggttcaccgtgacagtcatccgagcccacgacaacaccggcaacaacttatcagcaaacacgtgaaaccgcacctgaaaatccttaatatagcgtccacgacgctcatcatcggtcagaaacacatccggcggaaaccgccacgcattatcccgcaacacctttttagccaccgactccgccggacccgaatagtgggcataatccctattggcacgccactccatcccaatgatgctggaacgataaggcacaggccacaacagcatacgccacaacaggcggatatcatcctcacacgtgatagtcacccgcgaagaacgccaaggacccacaccatgcacccgacgcacaggcccagaaaaaatctggccaccaccataatcaacaaccagccgtgcacccggcctaatcaacccgtcaagcctagaatgatcaccagacaccaccaactccaacgtcgacaaaccattccacttcaacgacaacttcaacgactcaaaaaaattgataggcgccacccggcgataatccggcgtaaacaatgttacctgcggaacaagaccagccatcaaccactcaccaagccctcaaaaacctgtactgcaccgacaccacaatggcacccaaaccaaccatctcaatattcacactccgagaaccgccaggcggaatcggcgcaaactcccactctgtcaaacgatccatcacatcctcaaacccgttcaacaacgccgactgctggcgaggatccgtatcaatagtgatccaatcatactcctcgacaggataatcagaagacacacgcaaaccatcaatctgcacagaccacgactccaacgggccctcaacacgaatcacaggccacgcaggcacatcacccttattagacagattatcccaacccgagcccacacccggtgttaacaccacaggaaacgcggtaccatccttgccgacagggccgccacccaaccaatcctgcaacttcgcattactgaaacgaaacctctgctcatccccataccaaaacgggtcataagccgtcaaatgcaacacataacgcgcataaccccggttcaccggatcaaccgtaaacgtgtcatcagccgaatcaaaccggcagtgtagcacacgctctttgccggcaggagtcttcacagacagttccccctcctccccaggaggaaacgcagaccacaactcgttatacgccttcaaaaaaccgtcacgaaacccgcccaccagatccgggccaacacccgacaccaggacaggcaaagtcacctcgcgaggcttcacattaaaaccgcgccactccgagccgtgcaccccaacatgagtttgagaaaaatgctccacctcgggcacacccaggccgcgcaacgaatcattcaacaacatgacaggagacgcacccgtataatccgtcaaatgaagcacacgctccggatcattaccaatcaacggcaacatagaccaggtaacagtcaaaccagaacgatcagacgggtcaggaataaacatgcacaacactcccctatcacatgtaagccaatgcgttcaaagcgtcacgctgctgccgctcaatccgcttcgcgaactcgttcggatcaccatacgtgggtccgttcacattcaccacaacactcccacccttggcacgctgatacttgtcatacggcgtaaacgagcccacaaacgaccgcacaccaaaccgggcatccaccgcatccggaagacggccagccacacccgacatcgcatccaacgccaaaccagcattcccagtaataccctcagccaaaccggcaacaacctgccggccaacctggtcacgaaacaccctagacggggaatgaatacccaacaccgacttcgccgcattagcaacctgagaacccatattacgcaccgtatccaacaggccactcatagcattcctgataccattacccaaaccggccaccacatcacggccagcagacaccaacagagaccccatgttacccaaggcgcccctaatattgctgggcagattccggaaaaaccctaacacactatgcacaccggaagacaccgcggaccccatagcatgcatagcagaagatgccgcactccgggcaccattaaacccgcgcacagcaccactacgaaccctagtcgccatcgaactgaaaaacccgccaacagcagacgccaccgaagacacaacactacggatagcattcatcgcagacgaaacagcgccacgagccgcgttaaaaccagacctcacatgggaggcaaccgaagaacccatccgggcaaaaaacccaacaacagcgttcacgccgccggaaatcaccgacttgaaaccgttaataaacgcagacgtaaacgctctaatatgattccagccagcctgaaccaccgaacccatacgcgccaaaccagacacaaaatgggcaacaacccacgagatgacacgggcaacagcggcaataacacgggccacagccgacacgacagcaccaacaatacgggccacaaacccgaccacagcagccaccatcggagccacaacagcaagaatacgggccaccacctgtatcacaaccgcaacaacctgaaccaccacacgcataaccgccgcaatcacaggcatcaacgaccggataagaccaataatcggtggcagcacagacatcaccgcaccgagtatctgctgaatcacaggcatcaacaccggcaccaactgcatgaccacgccaacaacctgccgtatcacagcaacaacagcctgcaacaccggcatcaacgtaggcagcaacatggccgccacctgcgtcaccataccaataatctgcgtgatcacaggcaccagccgggccaccaacatactgatcacaggcacaagctgcgccgctaacccggcaaccaaaccaataatctgggcaaacactggcgccaaccgtgccaccaaaccagcaattagaccaaacacaggctgcacagcggccataatctgccccagggcttgaccaaccacaccaacaagctgcataacagcggcacggaactgggcgttagtggcaaacatggcagcaaacaagccgatcacaatcccgacagggccacccagggcgcgaaacacgccgccaagcccgccagcggcacccttcaaagcaccaaacgacggcagtagattcttcaacgcaaccgccaacggggcaaaccctgcaacaagtttccccacaccggcagcaacaataccaaacactgcggtgccgccagcaaacatggcagccaaattcactttagggacaggcaaatgcattctcgcaaaaatgcccttcaactgctccaccttggcgcgcatctgtgcattcattctcgtgatcatgcccggcatgcggttaatccacgccaaaatagacggcatcatccgctgaatcccctgatccaccgacgcaaacaggggcttcacagaatccgtcaccgacttgatcaccggattcaacgccacaaaaatctgccgcaaaccgttcaaaaacggggccatagccgtagcaccaagatagcccagggcgctcatcacattcttcatagcgccctcaaacgtcttaccagacgcctgcgcagcaccacccatgccaagcttcatcgcagccgcaaacgtgttaaaatcaatctgccccttcgacaccatctgcgacacctcagcagacgttttacccgtctgcctggcaagcaaagacagcacaggaacacccgccatcgtaagctgcaacatgtcatcgccctgcaacttaccgcgggccatcacagacgtaaaaatagcgcccgtatcctgaaacgactgacccgaaatataagacacatcggcgacagtcttcaacacatccgtcatctgcccgccagacttcacacccgaagcagacaacgccgcagccgtaggcgccgcatcacccaacgcatacgacgtaccagtcacagcctcaatagccgaattcataatcgaagacgtgtcagacgacgtgtgacccaaaccagtcagcttagcctgagcctcatcaatagccatcgccctagcaataccgccaccaatagtcacatcatagatagacttcaaacccttcttagcaacattgatggcacccatcatcgcagcgccacccaaagccaacttcatcccgctagcaaacaggctacccgaacgctgaccctcagcaggcatcacacccgacaactgtttaccaacatccgccttcaaacccggcatcttcgtatacaacgacacataggcggaagcaatctcaccagacatacactattcaccccataatattaatctcgcgagacaccccgccaccggcacgaacacgcgccaaaatatcgtccacctgcccagacgtaaaccgggccctacgctcatccgtaggcctcgccacaggctccggctgcccctcactattagcagacctgtaatgatccaacatgtccaacaccgcccactccgaccactcaaacgggcgctgccaaccattcaggtgggccgccaactggctagacgtatcagtacacaacacgccagccagccggacagcctcaccccaacacattatcgggccaccaacatcataaaccgagcaaccgaaccgggtcctccaatcatattcgatggccccacgataatcatcaatcaggccgtggagccaaactattcccccagggaggcacccttaccgtcaggcttgtattccatccactgacggaaaatctcggcaacacgaaccataggaagcccctccaaagcctccacagcgtcagccggggcggcagcctccaacatagaaaacatcacctcaacctgggcgaaatccgcagactcccccgactgggcaatcttagcggaacggcgaaaaacacgggcaggaacagcctgagccgtctcctccgcatccgccaacacccagctacggtcaccaatcttcagcgtgaaaccagtgtcactcatctatcaacaatcccctaaaatcgtgtatcagttctcggacggcggattcggatccggctgaggcttcggagaaggaggagtatcagcttttaaagccgtcatccacccccgacccgacaccgcatcgcccttcttattaatctgagcaggatacgccttcaacgtcacaccatacccgtacacctcgccattcttgcccttgatctcgtcacgatcgatcaactcaacctcagggaaatagtagcgaataacctgatcaccatcaacaatatccatcaacagggcgtgaacacccgtcgtggcaccaggtgaaatatcgaacgaacccgaatcggctccggcagtaaccttcgactgccaaaacagttcgataacctctttcttagactcgatcagctggaaagaaatctcgatagacgactctgtagccacagtgcgaacaacatccgcattctgccaagccttcaaatcatccgttttacgctcaggcttaatcttaaacccgtcatccgacaggtaccctaaagcggtaagaccgtcaggaaccgtcttcacaccatcaatagtgtcaccggcatgagctttaccaatatagacgtcacccgtaacagcagagcgaacattagacgctttacgtgttgcagccatcataacccccattaaatatcaaacaattacattaaaacaaaaacaataagctaattcagactccgcaggcctacatataagctcaaaagcga

SEQ ID NO: 75 - DNA, 11552 bp, Pahexavirus sp.
  source 1..11552: mol_type = genomic DNA
agtcgtctatcgagatttctttccagctgatcgagtctaagaaggaggttatcgaactgttttggcagtcgaaggttactgccggagccgatgcgggttcgttcgatatttctcctggtgccacgacgggtgttcacgccttgttgatggatattattgatggcgatcaggttattcgctactatttccctgaggtcgagttgattgatcgtgacgagattaagggtaagaatggcgaggtgtatgggtatggtgtgacgttgaaggcgtatcctgcccagattaataagaagggtgatgcggtgtctggtcgggggtggatgacggctttaaaagctgatactcctccaactcctcctccagccccgaagcctccgaagcctgagccggatcctaatccgccgtctgataactgatctatttgttgcgataatgtttatgctgtgtgcaggggggggtgttgatgggtatcattttgaagcctgaggatattgagcctttcgccgatattcctgaggggaagcttgaggcgatgatcgccgatgtggaggctgtggctgtcagtgtcgccccctgtatcgctaaaccggatttcaaatacaaggatgctgctaaggctatccttcgtagggccctgttgcgctggaatgataccggtgtttctggtcaggtgcagtatgagtctgcgggccctttcgctcagactacacggtctaatactcccacaaatctgctatggccctccgagattgccgcgttgaagaagttgtgtgagggtgatggtggggctggtaaagcgttcactatcacaccgaccatgaggagtagtgtgaatcattctgaggtgtgttccacggtgtggggtgagggttgctcgtgcggctcgaatattaacggctacgctggccctttgtgggagatatgatatgaccagttttccttacggtgaaacggttgtgatgctccatccgactgttcgtgtcgatgatcttggcgacaaggtggaagactggggtcatcctgtcgaaaccgtgttccataatgtggccatctattcttcgttgtcgcaggaggatgaggcggcaggccgtgactctgactatgagcattggtcgatgctgttcaagcagcctggcaagggtgctgattatcgttgccggtggcgtattcggggtgtggtgtgggaggctgacgggtctcctgtcgtgtggcatcatccgatgtctggctgggatgctggtacgcagattcatgtgaagcgtaagaagggctgatagattgtggtccaggatgtgaatgtgaagctgaacttgcctggtattcgtgagttgttgaagtcccctggggtgcagggcatgttggctgagcgtggcgagcgtgtcaagcgtgcggcctcggcgaatgtggacggtaacgctttcgatatggcccagtatcgtgcagggttgtcgtctgaggtgcaggttcaccgtgttgaggctgtggcgaggattggcaccacctataggggtgggaagcgtattgaggcgaagcatggcacgttggcccggtcgattggggctgcgtcgtgatcgtttacggtgatcctcgcgtgtgggctaaacgtgtgctcaaggatgatggatggctgtccgatataccgtgtactgggacggtgcctgacgatttcagcggtgatctgatttggttggcgttggatggtggcccgcagttgcatgttcgtgagcaggtgtttttgcgggtgaacgtgttttccgatatgcctgatcgggccatgtctttggctcgtcgtgttgaggctgtgcttgtagacggtgttgacggtgaccctgttgtgtactgtcgacggtctactggccctgatcttttggttgatggttcacgttttgatgtgtattcgctgttcgagctgatatgtaggcctgcggagtctgaataagcttattgtttttgttttaatgtaattgtttgatatttaatgggggttatgatggctgcaacacgtaaagcgtctaatgttcgctctgctgttacgggtgacgtctatattggtaaagctcatgccggtgacactattgatggtgtgaagacggttcctgacggtcttaccgctttagggtacctgtctgatgacgggtttaagattaagcctgagcgtaaaacggatgatttgaaggcttggcagaatgcggatgttgttcgcactgtggccaccgagtcttctatcgagatttcttttcagctgatcgagtctaagaaggaggttatcgaactgttttggcagtcgaatgttactgccggagccgattcgggttcgttcgatatttctcctggtgccacgacgggtgttcacgccttgttgatggatattattgatggcgatcaggttattcgctactatttccctgaggtcgagttgattgatcgtgacgagattaagggcaagaatggcgaggtgtatgggtatggtgtgacgttgaaggcgtatcctgcccagattaataagaagggtaatgcggtgtctggtcgggggtggatgacggctttaaaagctgatactcctccgaccccgcctccttctccgaagcctacgccggatccgaatccgccgtctggtaactgatacacgattttagggattgttgatagatgagtgatactggtttcacgttgaagattggtgaccgtagctgggtgttggcggatgcggaggagacggctcaggctgttcctgctcgcgtgtttcgccgtgccgctaagattgcccagtcgggtgagtctgcggatttcgcccaggttgaggtgatgttttctatgttggaggctgccgcaccggctgatgctgtggaggccctggaggggcttcctatggttcgtgtggccgagattttccgccagtggatggaatataagcctgaaggtaagggcgcctctttgggggaataatttggctccacggcctgattgatgattatcgtggggccatcgaatacgatttccgcaccaagtttggtgtttctgtttatagtgttggtggcccgcagatgtgttggggtgaggctgtccggctgacacagattttgtgtagtgacacgtcttgtcagttggcggcccacctgaatggttggcagcgcccgtttgagtggtgtgagtgggctgtgttggacatgctggatcattacaggtctgctaatagtgaggggcagccggagcctgtggcgaggcctacggatgagcgtagggcccggtttacgtctgggcaggtggacgatattttggcgcgtgttcgtgccggtggcggggtgtctcgcgagattaatattatggtgtgaatagtgtatgtctggtgagattgcttccgcatatgtgtcgttgtatacgaagatgcctggtttgaaggcggatgttggtaaacagttgtcgggtgttatgcctgctgagggtcagcgttcgggtagtctttttgctagcgggatgaagttggcgcttggtggcgctgcgatgatgggtgccatcaatgttgcaaagaagggcctcaagtctatctatgatgtgactattggtggcggtatagctagggctatggctatcgatgaggctcaggctaagttgactggtttgggtcacacgtcttctgacacgtcgtcgattatgaattcggctattgaggctgtgactggtacgtcgtatgcgttgggggatgcggcgtctacggctgcggcgttgtctgcttcgggtgtgaagtctggcgggcagatgacggatgtgttgaagactgtcgcggatgtgtcttatatttctggtagatcgtttcaggatacgggcgctttttttacgtctgtgatggctcgcggtaagttgcagggcgatgacatgttgcagcttacgatggcgggtgtcccggtgttgtctttgcttgccaggcagacgggtaagacgtctgctgaggtgtcgaagatggtgtcgaaggggcagattgattttaacacgtttgcggctgcgatgaagcttggcatgggtggtgctgcgcaggcgtctggtaagacgtttgaggtcgctatgaagaatgttaagggtgccctgggttatcttggtgctacggctatggccccgtttcttaacgggttgaggcagatttttgtggcgttgaatccggttattaagtcggtcacggattcggtgaagccgatgtttgctgccgtcgatgctggtattcagcgtatgatgccgtctattttggcgtggattaaccggatgccggctatgatcacaagaatgaatgcacagatgcgcgccaaggcggagcagttgaagggcatttttgcgaggctgcatttgcctgttcctaaggtgaatttgggtgccatgtttgctggcggcaccgcagtgttcggtattgttgctgcgggtgttgggaagcttgttgcggggtttgccccgttggctgtgtcgttgaagaatctgttgccgccgtttggtgctttgaggggtgccgccggcgggcttggcggcgtgtttcgcgcgctgggtggccctgtcgggattgtgatcgggctgtttgctgccatgtttgccactaacgcccagtttcgtgccgctgttatgcagcttgtggctgtggttggccaggctttggggcagattatggccgccttgcagcctgtgtttggtttggttgctggtttggtggcccggttggcgccagtgtttgcccagattattggtatggttgccgggttggctgcccagttgatgcctgtgattggtatgttggttgctcggctggttcctgtgatcacgcagattattggtatggtgacgcaggttgcggccatgttgctgcctacgttgatgccggttattcaggctgttgttgctgtgatacggcaggttgttggtgttgtgtcgcagctggtgccggttttgatgcctgtgattcagcagattttgggtgctgtgatgtctgtgctgccaccgattattggtttgatccggtcgttgatgcctgtgattgcggcggttatgcgtgtggtggttcaggttgttgctgttgtgatacaggcggtggcccgtattcttgcggttgtggctccgatggtggcggctgtggtagggtttgttgcccgtattgttggtgctgtcgtgtcggctgtggcccgtgtgattgctgctgttgcccgtgtcattggatgggttgtggcccattttgtgtctggtttggcgcgtatgggttcggtggttcaggccggctggaatcgtatcagggcgtttacgtcggcgtttatgagcgggtttaagtcgatcatttctgccggtgtggccgctgttgtggggttttttacgcggcttggtttgtcggttgcttcccatgtgaggtctggttttaacgcggcccgtggcgctgtttcggctgcgatgaacgggattcggagtgtggtgtcttcggtggtgtccgcggtgggctcgttctttgggtcgatggcgtctagggttcgtggtgcagcctctagcgggtttaacggggcccggagtgcggcttcttctgctatgcatgctatggggtccgcggtgtcttccggtgtgcatagtgtgttagggtttttccggaatttgcccagcaatattaggggcgccttgggtaacatggggtccttgttggtgtctgctggccgtgatgtggtggccggtttgggtaacggtatccggaatgctttgagtggcctgttggatactgtgcgtaatatgggttcccagattgcgggtgctgcgaagtctgctctgggtattcattccccgtctcgggtgtttcgtgacgaggttggccggcaggttgttgccggtttggctgaggggatcactggtaatgcgggtttggcgttggatgctatgtcgggtgtggctggccggcttccggatgcggttgatgcccggtttggtgtgcgatcatcggtgggctcgtttaccccgtacgaccggtatcagcgtgccaggggtgagagtgttgtggtgaatgtgaacggtcccacgtatggtgatcctgccgagtttgcgaagcggattgagcggcagcagcgtgacgctttgaatgcgttggcttacgtgtgattgagggtgttgtgcatgtttattcctgacccgtctgatcgtgccggtttgattgtggattggactatgtttccgttggtgggtaatggtccggagcgtgtgcttcatttgacggattatacggggtcgtctcctgtcatgttgttgaatgattcgttgcgcggcttgggtgtgcctgaggtggagcatttttctcaaactcatgttggggtgcacggctcggagtggcgcgggtttaatgtgaagcccctggaggtgacgctgccggtgcgggtgtcgggtgttgacccggatcctgcgggcgggtttcgtgacggttttttgaaagcctatgatcagttgtggtctgcttttccccccggcgaggagggggagttgtcggtgaggactcctgcgggtgttgagcgtgtgttgaagtgccggtttgattccgctgatgacacgtttacggttgatccggtgaacaggggttatgcgcgctatctgttgcatttgacggcttatgacccgttttggtatggggatgagcagaggtttcgttttagtaatgcgaagttgcaggattggttgggtggcggcccggtcggcaaggatggcacggcgtttcctgtggtgttgacaccgggtgtgggctctggctgggataacttgtctaacaggggtgatgtgcctgcgtggcctgtgattcgtgttgaggggccgttggagtcgtggtctgtgcagattgatggtttgcgtgtgtattctgattggcctgtcgaggagtatgattggatcactattgacacggatcctcgtaaacagtctgcgttgttgaatgggtttgaggatgtgatggatcgtttgacagagtgggagtttgcgcctattccgcctggcggttctcggagtgtgaatattgagatggttggtttgggtgccattgtggtgtcggtgcagtacaggtttttgagggcttggtgagtggttgatggctggtcttgttccgcaggtaacattgtttacgccggattatcgtcgtgtggcgcctatcaatttttttgagtcgttgaaactgtcgttgaagtggaatggtttgtcgacactggagttggtggtgtcgggggatcattctaggcttgacgggttgactaagccgggtgcacggctggttgttgattatggtggtggccagattttttctgggcctgtgcgtaaagtgcatggtgtgggtccgtggcgttcttcgcgggtgactattacgtgtgaggatgatatccgcctgttgtggcgtatgctgatgtggcctgtgaattatcgtcccggtttggtgggttcggagtggcgtgcggacagggattatgcccactattctggtgcggcggagtcggttgctaagcaggtgttgggggataatgcttggcgttttccgcctggtttgtttatgaccgatgatgagcgtcgtggacgctatattaaggattttcaggtgcggtttcacgtgtttgctgataagttgttgccggtgttgtcgtgggctcggatgactgtcacggtgaaccagtttgagaatgcgaagtttgatcagcgtggtttgctgtttgattgtgtgcctgctgtgacacgtagccatgtgttgaccgccgagtcgggttcgattgtgtcgtgggagtatgtgagggatgcccctaaggcgacgtcggtggtggttggtggccgcggcgaaggcaaggacaggctgttttgtgaggatgttgatagcctgtctgagggggagtggtttgatcgtgtagaggtgtttaaggatgcccgtaacacggatgaggatgcgtttcttgccgatgaggctgagcgggtgttggccgagtctggggccacgtcggggtttaagattgagcttgctgagccgaaggtgttgcggtttgggcccggcaggttgatgcccggtgatcttatctatgtggatgtgggttctggacctattgcggagattgtgcggcagattgatgtggagtgcgattcgcctggtgatggttggacgaaagtgacaccgatcgcgggggattatgaggataatccgtcagcgttgctagcacggcgtgttgccggtttggctgcgggtgtgcgggatttacaaaaattctagaagattgaggggtttgttgtgggtattgtgtgtaagggttttgatggtgtgttgaccaagtttgattgggctcaaatgtctggtctgatgggtaatatgccgacggttcaaggcccggatggttttcgcgtccgggctactgttcagggtgccacagtgttgtgtgaggttttgcctgggcaggcttgggctcacggtgtgatgtgcacgtcgaatagtgttgagacggtgacggggcagcttccgggccctggcggcacccgctatgactatgttgttctgtctagggattgggaggcgaatacggcgaagttggagattgttcctgggggccgtgcggagcgtgccagggatgtgttgcgtgccgagcctggcgtgtatcatcagcaactgttggcgacactggtgttgtcgtctaacgggttgcagcagcagttggataggcgggctattgcggcccgtgtggcttttggggagtcggcagcctgtgaccctacccctgtggagggtgatcgtgtgatggttccttctggggctgtgtgggctaaccatgccggggattggatgctgttgtctccgaggattgagacgggttctaagtcgatcacgtttggcgggtcgaatgtgtatgcttacacgatcccgtttgagcgccagtttgcgtctccgccggtggttgtggcgtctatggctacggcggctgggggcacgacacagattgatgtgaaagcctacaatatcactgccaaggattttggtttggcgtttattacgaatgatgggtctaagccgaatggtgtgcctgcggttgcgaattggattgctgtcggcgtgtaatgcgcggcctgcggatatgtgacgtgttgtggtggttgtagtggtagggggctgtagtgtcatggtttacacctacgcttatggcctctctttgtaccgctatcgccacggttttgggttctgttcaggcggttacgtacaggtcgaagaagcggttgaggcagttgtctgcgcaggttgatgcgatggaagagtacacgtggaatattcgccatattgttcaccgctataacgcgaatctgccggagaatgttgagcctgtcaagatgcctgatttgcccgagtttttgaaggatactgttgatggtggtggggggtgaattgtgagggagttggaggaagagaagcggcagcgccgctcgtttgagaaggcttccctgatactgttgttcttgtcgcttgtcctgttggcggtggttgccgggggtgctttgcggtatgggtctgtggcttcgcaaagggattcggagcagactaaagcccagtctaatggtgcagccgccaaagggttggctgcccgtgtgaagcgggtgtgtgcctctggcggcgcggagtcggtgcgtcttcaccagtctggtttgtgtgtggatgctcagcgtgttgagcagagtgtgcagggtgttcctggcccggctggtgtgcgggggccgcaaggcccgcaggggccggctggtgttgatggttcggctgggctggttgggcctgttggtcctcaggggtctccgggtttgaatggtgtggctggcccgcaagggttgcctggcgctgacggcaaggatggtgttccgggtcgtgctggtgctgatggccgtgatggtgtgcctggtagggatggcgctgatggggctgatggtggtcgtggcccgcaagggccggctggcgctgacggtgcacagggtgaacagggtgagcgtggccctgccggtcctgtgggtcctgtaggtccgcagggttctgccggcgccgacggcacgaatggccgggatggcaaggacggtaaggatggtaaggatgggcgctcggtgatatcggtgtactgtgctgggggccgcctggttgtgaaatatagtgacggtacggcctctacaatatcgggttctgcagcctgcgagagtgtgaaaccatcacctgtggttaccgtatcatcccataggtgaacaagaagagggaagggtgttactagtgttggtcgtgtttggtggtgacatgcggtgaggtttattcctgcagcgcatcactcggccggctctaatagtccggtgaacagggttgtgattcatgcgacatgcccggatgtggggtttccgtctgcttcccgtaagggtcgggcggtgtctacggcgaactatttcgcgtccccatcggcgggcggttctgcccattatgtgtgtgatattggggagacggtgcagtgcctgtcggagtctacgattgggtggcatgccccgccgaatccgcatagtttgggtatagagatttgcgcggatgggggttcgcacgcctcgttccgggtgccggggcatgcttacactcgggagcagtggcttgatcctcgtgtgtggcctgcggtggagaaggctgccatcctgtgtcggcagttgtgtgacaagcatggtgttccgaaaaggaagcttagcgtatccgatttgaaggctggtaggcggggcatctgcgggcacactgatgtgacggatgcgtggcatcagtcggatcacgatgatccggggccgtggtttccgtgggacaaatttatggctgtggtgaatggccacggcggcggttcaagtagtgaggagttaacggtggctgatgtgaaagccttgcatgatcagattaaacaattgtctgctcagcttactggttcggtgaacaagctgcaccatgatgttagtgtggttcaggttcagaatggtgatttgggtaaacgtgtcgatgccctgtcgtgggtgaagaatccggtgacggggaagctgtggcgcaccaaggatgccctgtggagtgtctggtattacgtgctggagtgtcgcagccgtcttgcccggcttgaggcggacgtgaaccggttgaaaaagtgatggtgatgtgtgatgggtaaacagttttggttgggcctgctcgaaagggcgttgaagacttttgttcaaacgtttgtggctgtgcttcgggtgactgcgcgtgtcacctatactgcggagtcgtttcgtggtttgccgtgggaatcggcgctgatcacggccacggttgctgcggtgctgtcggtggctacctcgtttggtaacccgtcgtttgtggccggtaagcctggcaggcagcccctggtggatgcgggtttggttccacccgatgatggggggatggttgagtctcacctggttgatgtgtcggatcctggcatgatcgagcctgcagatgatgtggatggttttgccggctatgagcctcggcgtgccgccgagtcggaggttggcacggtagagcctactgt

SEQ ID NO: 76 - DNA, 17731 bp, Pahexavirus sp.
  source 1..17731: mol_type = genomic DNA
gatactagcccttttacatcactacgagtccgatggttgaattgttttgtttgtttcggtgtgtttcgtagttgcgtgcctcccggctggcttgtttcacgaattgggctaggtgtggccggccggctttcgcctcgatcacgtatgtgtggtttttggttttgagggtgaggtcgccttcgtcttcgcgaccgttgaggtggagtcgttctatatcatggccggtgtcgcgtagttggtggaggagtcgtgtttcccattcggcgccggccctgcggtttcttgattgctgtgtcgacatgatagtcctttgtgtgttgtggtcatgttccagggctgtttttctacgagtggcccgaagaatgtgtattcggggtaggctcgtagccgctcgtattgggtgccgtcggggctggatttgcctgtgcgctgtttgagtacggcgatacgtgcctcggctgggatggtgagcccgttgccgttatcctcgccaccatacaatgagactccgaggatgagttgtggtttttcggagaggccgtttttgatttctcgccgggcgggcgggtgttcgatgtcggagccggttttgtcggttgcgtggtgggtgacaataatggtggagccagtatccctacccaatgctgtaatccattgcatggcttcttgctgtgcctgatagtcggattcgcagtcttggatgtccatcaggttgtcgatgacgatgagtggtgggaaggtgttccacatttccatgtaggcttgcagctccatggttatgtctgtccatgtgatgggtgactggaatgagaatgtgatgtgttggccgtggtggatgctgtctcgatagtattctggcccgtagtcgtcgatgttgtgttgtatctgggcggtggtgtgttgggtgttgagtgagatgattcgtgtggaggcctcccagggtgtcatgtcccctgatatgtagagggcgggctggttgagcatcgctgtgatgaacatggctagcccggatttttggctgccggaccgccccgcgatcatgaccaaatcccctttgtgaatgtgcatgtccaggttgcggtagaggggtgcgagttgtggtatgcggggcagctcggcggctgtttgggaggctctctcgaaggatcgttggagagagagcatcggagccttaatctatctgtcggtttggttgttggtggtcagatggagtcgatgtctacatcatcactaccggtggtgttgggcttgctgtctcgccgatcaacgtaggctgctacaaggtcgtagatggcgtcatccaatggtttgagcacgaccgcgttgaacccgtttttggtgcgcacggtggcgagtttgaaggcctgctcctcgccaaggtaggcttctagatcgcggatcatggagtgtggacggtcgttgctgccgcgtgctttctcaataatagcgttggggatggtttctggggtgccgttgttgagatcgtctagggtgtggaagattgtgacatcagcgtagatgcgatcggcgacctgtccaccgtagccttcagtgttgtgttctacgtcgcggattttgaaggcgatggcggtggcgtcctggtttcgggaggggttgaagaaggtgctgttgctgttgttgcggtagttggcgagtcccattgttgtttcctttactgtttgtgttgttttgtttgttggtttgtgtcggttttatcgggtgaggctgtttcgtttgttgcggaaagcctcagacacgtcactgttactagtgatggtctttttgtattgtttgaggaggtctgctagctgtgccttgcttgtggcattgttgattttgttgatgatggtgttgtttccttctgatgcgatgttgtctacgtagtctttggcggcctgattgtagcgatcttggaggatgatggatgctgtggcgatcagggttgccaggtcccagttccttgccgcggagctgtttttgagtccgcctagcaggtcgatgatagtcttctttacctggtcggcggtgtctccgcggatgacggtccatggggcggcgtagtcgcctccgtatttgagtgtgacggtgaatcgatcgtcgtctctgttgtcggtcatttggtgtccttttctttattgtctgtttggggtggctgtacggtggtttctaccgggtacctgtaggcgtctttcccgttgacagcccagcaggcgtccttgacggggcagcgtttacagagtgctgtgacatggggtacgaagatgccttgactgattcctttcattgcttgactatacatggatgatacatgccggtaggtgttgttgtcaagatcgtacagttcggtggatgtgccttgtgtcggggacttgtcgtcattgcggctggtggctggcgtccaaaacatgcctttcgtcacatggatgccgtgttggttgagcatgtaccggtatgtgtgcagctgcatgctgtcggctgggaggcgtccggttttgaggtcgaggatgaaggtttcgccagtgtcggtgtcggtgacaacgcggtcaatatatccgacaatagtggtgccatcctggagggtggtttctaccgggtattcgatgcctggctggccgtcaataacagcggtgatgtattctgggtggttgcgcctccatgtttcccaccggtccacaaaggtggggccgtatatcatccaccaattgtagtcttttttgtgtggcccgcccgactcgcacatgtttttgcacaccctgccggagggtttgatttctgtgccttcggattcggcgagggcgacttgggtgtcgaaaatgtttttgaaggatgcgagtttgtctggcagtgcagggtattcggcgggattgtacaggtgtaggtcgtattgttcggtgatgtggtgtatggcgcttcccgcgatggtggcataccaggtgtggtgttgggcgtggtagccgtgggataggcgccatttttctccgcattcggcccactgggtgagtgaactgtaggagatgtggcctggatggtcgatggttttcggatattgtgctagaggcattacttgttgtctttgttccatgggttgcgggtgtcctggccggcattgtgttgctggtatgcgaggagtgccaagcagtgccaggcagcatgggctagatggggtagcccggattcgtggtcgaggttgttgccttgctgccatgatagcacatggcggtagagggcgtcaacgctgtggctccacgggtatcctccggtccagttgttgtcgccgtatttagtggcaccgtagcctgccacagagcctagggcgtgcaaggctgcggggtcgatgagggatagcctgcagagtttcaattcttttcgggcaccggtgttggggtcggtgtatatgcgggtgggctcatccatggggtgtgtgctccttaggggtgggttactggttgttgttgtgggcgagtgctactgcgagaataatgatggcgagggtttctgcgatgaggatgggtgttgtgatcatttagtgtctcggggattgttggtgagggttgaggcgcctaggagggtggcgagggcgcatgcggcgatgatggcgagggctgccttgtgtggggtgccggttgcgtacatccatgtgatgatggcgccttggatccaggcgaggctggtgaagaacgtttcgtagctgtgtagctcaatgttgttgttgggtgtgttcatgcttgctcctgaagaatggtgttgatggttttataaatgttgtacaggtcggtttcgatagataacagttgtcggatttcgtggtcgagatcaatgtctgggttgagggtgttgattcgggaggcgatatcggtggctgtgcgtagtgtgccgccggtgtggtgaatcaggtgtgccgtgtcggcgagtccggtggtgacagcgtagtgggagaggagaggcatagctggggggtgctccttggcgggttactgttgcgggttgatgttgaggtcggtgacgttggggtgttcttctgttccagtgacgaggcagtggacggtgacgggtagtttggatgcgccgggctgtttcatggttgcgccgtagacgatggagaaggtgtctttaccaataattttgtggagttggaggtcgatgtcggggttgccgttccagttgacaccgtgtgctgcggcctgttgttcggctttgcggttgcaggtgtgtgcggcggtgatcatggtgagaccccgtgaggtttcttcaccccttgcttgggcttgcttgtgggttttggcctgctcggctcgcagtgactgttctgcggctgcctgccgtgctttcttctcagccttgcgctgttggacggttttgggggtccattcggtgttggctgtggtggcctgtggggctggctgtgaggtgagtggcggattgtcgtctggggctggcatgaatgaggctgcggcgatgatggcggctgttattccggcgatggtgtagcctgttttcttgttcatgactgtggtcccctttccggggtgttgttcgttgctgacatgatcaatactttcagcggctgggcccactgtcaaggtgtcgctcagttcgtgtgagcgatccttgtatggctaggggttttatcgggcgcacagggtgagtaggtggccaacattgatgcggctcacattccagtagagttgtgtggcttccccactagtgagtggcttccactcgttatggctgaacacggtgccatcggatgcgatgaatgtgttggggcgtagcttgtggagttcggcttctacgctctgccggtaggcttcggcgaggccctcaaaatccatgtggtcgcaggagaggttttcgaggcgtgtcaggtcgaagggtgtggggcagtcgtagctggcgggggtgtagagctgggtgaagtggttggcgatcttctgcatcatgattccttttctggtgatggtgtgttgatggtttagtgggtggatgcgacaaggatggcgtctacgtcgatcatgtcgatgagatcatggagttcctcggcctcattctcggataggtggcgccagtcgggtggcccgtatagggcgccgtcgagggtgacagtccagtcgggtcggatgagtcgtatggcttcttgtactttggcgtggtacatgcggcgcaccatgtcgagatcaatgtcctcgctgtggtttccggtgaggctgtggaggctgagggggtcgatttctgtctgcctgtagaggctggtgaatgatggtgtgatgagtgtgccatccatgggtgtgctcctttcggtgatgtaggggttgttgtggtttctagagtgtgcgagctgcgaccccacagtcaaggctgcactcaaccggattgagcgtttcatggagggtgacggatgtcactgaagcccttatggcctctcccagcgtctcaaatcttctgggggtaggatgatgcagggttagtcctgctgatcgattctaggccccatacagggcgtctcagtggtatgtctgggtgatagcgggtgtggcagatgatctagcgggtcaaggtgccgggcttagacataagatctatcatctagatgtgtgagatgtatcacactctcctggcttggtgtgccccctcaaggccacccagccgatctggcgtgaagggtgtagcccagaaatgccgtttaaagccccaacatggcgcctaggagtgccttgcagggtgggggctaggtatttatacccccagcatattctgatcgattctagacgcctacaggagactgatacgcgatccgctatccagacacagatcaccagcccctatcctggttagctaagcctcaactatgtggacagtgttggatactgtgggggaggaaggacgcggtaaaagaaagaggggggcatcagccttcaagccttaaggtcttagcgcttagcaccgatggtcttagcagttagcaccgagccacctcaagggctcggcagcagcccgaacaggcacagccctgaaaagggcacacgccatcagggaaggcttgagagtacgaggagccttagcgacgagtactcgaaagcctgagggaacaccctcagcactgatgggcctagcgtgttcggaaaggacacaggggtaaggtgtgacagctgtccgggagtgaaacccgttctgactaggggtttcagccttaaccaccctcaaaggttacaagactctaagaaaatttaaggaaaagtttaggtttaatttttggacctttactaccaaaaacacccgtttacacccctcaaacccgcctatagagccaaatccaccagtttgactcatcccaggtggggtatgataggctggacaggtagccagctggacgcaaggccgaaatccgctgacgcggctttcacccttacatccatcagtctaccaaagacttaaaagcttaacagctaagcgctaagcccttaagaccttaacacttagcaccgagccccctcaagggctcggcatcagtcttaaagctttaaatactttaagtaaacttaagagcttagcacttaaagttaattaataaccttaaaggcttacacacttagcactgagcccttcaaggctcagcatcagtataaagaccttaacacctaagttaagtataaaaccttaaaggcttaacacttaaggatataaacttaacatcagtgtttaagactttaaaacttaaaataactattaagacttaaagactgataagctttaaacacttaaagtaactataagactttaacgaccttaagtacttaaagttaaccatcagtcttaaactttaatattataacctataagccttaaagcttataggtataataatataatataagttataaaagttttagaagagctaaggggttaacttctttacttctcttctctctttggttctttctctcttctcttcttttcttcatcaggggagaagaggaacctttaccgtcaacgctgacagacttttcactgtgtgtctcgtgtaccaccggtcgcacgctcccggtttgtacactctccacactctcacaccccgtgtcccctttacggcttagcgtgtacggctgaaggcgtacggcgtgtcacgctcacacccttaacaccaggtaagacttaaagtgtatattatatgtagaagactttaaaaccttaaggtgttcccgcttagcctgtgtcctttaacgctaggcgccaagcgctaagctgtgaaacgcgaacacacacctacccccatttttcttccgtgtccttctctttttgacaccgctggggggcgatgtgatctttttcacatgccagggggtgtgatgaaaaacaaccaccccggcacaaacagaacaccccctcaaacgaacaaaacagcccccagaatcgaacagcagggcaagggcaaggtattcatacccccaacggttcccaagccgttacaggagccatgagaggctcacaggggccataggagatcaggggacatgatggcacacaccaaccgcaccgcatccgcctcacaccggcgctggcgggcaagactcatcacccaagcccgacaacaaggccaaaccgaatgcccactctgcggaaccccgatagcctgggacacacacgatctaccaaccagccccgaagccgaccacatcacacccgtcagccggggaggactcaacaccctcgacaacgggcaaatcatctgcagaacatgcaacagaagcaaaggcaatcgcagcgaaccaaacatcaaattccaacaataaaccacaaaaacattaattccatggtgaaaaacccgccaacccccaccggggacaccccctgcacacccgtgcaagacctcgtacggcttagtgaaatacctcccttttgtggatttgtctgtttgtcgactttttgtgttggtggtgagtgttgtgcagcctgagcttcctgatagtcgtgattggtgtggggagacgcgtcgttggtggcgtgtgtggggtgaggatagccgtgcatcgtacgtgtctgatgaggagtggctgtttctcatggatgctgcggtgattcatgattgtgtgtggcgtgagggtcgcgctgatttggtggcatcgcttcgtgctcatgtgaaggcttttatgggcatcttggatcggtattcggttgatgtggcgtctggtggccgtggtgggggttctgcggtggcaatgattgaccggtataggaagcgtaggggggcctgattaggtgtctggtgttgttgggtctcaggttcctcgtcaccgggtggctgcggcgtattcggtgtctgctggcggtgatgctggggagttgggtcgtgcgtatgggttgactccggatccgtggcagcagcaggtgttggatgattggcttgtggtgggtgcagggggtcgtcttgcttcgggtgtgtgtggggtgtttgtgcctcgccagaatggcaagaacgctattttggagattgtggagttgtttaaggcgactattcagggtcgcaggattttgcatactgctcacgagttgaagccggctcgtaaggcgtttatgcggttgaggtcgttttttgagaatgagcggcagtttcctgacctgtttcgtatggtgaagtcgattcgtgcgacgaatggtcaggaggctattgtgttgcatcatccggattgtgccacgtttgagcgtaagtgtggctgtccgggttggggttcggttgagtttgtggcccgttcgaggggttctgctcgcggttttacggttgatgatttggtgtgtgatgaggctcaggagttgtcggatgagcagttggaggcgttgcttcctacggtgtctgcggctccttcgggtgatcctcagcagattttccttggtactcctcctggcccgttggctgatggttcggtggtgttgcgtcttcgggggcaagcgcttggtggtggtaagcggattgcgtggacggagttttcgattcctgacgagtcgaacccggacgatttagctagacaatggcggaaattggctggtgacacgaatccggcgttgggtcgtcgtctgaattttgggactgtgtctgatgagcatgagtctatgtctgctgccgggtttgctcgtgagcggcttggctggtgggatcgtggacagtctgccgcgtctgtgataccggccgataagtgggctcagtctgcggttgatgatgttgagcttgctggtgggaaggtgtttggggtttcgttttcgcggtctgggaatagggttgctttggctggtgctggcaggactgatgctggtgttcatgttgaggttattgatggcctgtcggggacgattgtggatggtgtaggcccgttggctgactggttggcgttgcgttggggtgatactgaccggatcatggttgccgggtctggtgcggtgttgttgcagaaggcgttgacggatcgtggtgttccgggccgtggcgtgattgtggctgatactggcgtgtatgtggaggcgtgtcaggcgtttttggagggtgtcaggtcgggtgtgatcagtcatcctcgtgccgattcgaggcgctatatgttggatattgctgtgaggtcagcggttcagaaaaagaaaggctctgcgtggggttggggttcctcgtttaaggatggttctgaggttcctttggaggctgtgtcgttggcgtttttgggggctaaacgtgttcgtcgtggccgtcgggagcgtagtggtaggaagcgggtgtctgtggtatgaactcggatgagttggctcttattgagggcatgtacgatcgtattaagaggttgtgttcgtggcattgccgtattgagggctactatgagggctcgagccgggtgcgtgatttgggtgtggctattccgccggagttgcagcgggtgcagactgtggtgtcgtggcctggtatagccgtggatgctttggaggagcgtctggattggcttggctggactaacggtgacggctacggcctggatggtgtgtatgctgcgaatcgtctatcaaccgcgtcatgcgacgtccaccttgatgcactaatttttgggttgtcgtttgtggctgttatcccccaggatgatgggtcggtgtcggttcgtccgcagtcaccaaagaattgcacaggccggttttcggctgacgggtctcgtttggatgctggccttgtggtgcagcagacgtgtgatcctgaggttgttgaggcggagttgttgcttcctgatgtgattgttcaggtggagcggcggggttcgcgtgaatgggttgagacgggccgtatcgagaatgtgttgggtgcggttccgcttgtgcctattgtgaatcggcgcaggacgtctcgtattgatggccgttcggagattacccgctcgatcagggcttacacggatgaagcggttaggactttgcttgggcagtcggttaaccgtgacttctacgcctacccgcaaaggtgggttacgggtgtgagcgcggatgagttttcgcagcctggctgggtcctgtcgatggcttctgtgtgggctgtggataaggatgatgatggtgacaccccgaatgtggggtcgtttcctgtcaatagtcctacaccgtattcggatcagatgcgtttgttggctcagctgactgcgggtgaggcggctgttccggaacgctatttcgggtttatcacgtctaacccgccttctggggaggctttggctgccgaggagtctcggcttgtgaagcgtgctgaacgcaggcagacgtcgtttggtcagggttggttgtcggttggtttcctggctgcccgggcgttggattcgagtgttgatgaggccgcgttttttggtgatgttggtttgcgttggcgtgatgcttcgacgccgactcgggcggctacggctgatgctgtgacgaagcttgtgggtgccggtattttgcctgctgattctcgtacggtgctggagatgttggggcttgatgatgtgcaggttgaggctgtgatgcgtcatcgtgctgagtcgtctgacccgttggcggcactggctggggctatatcacgtcaaactaacgaggtatgataggcgatggcttcgggtgttgcgtcgaggttggctgctaccgggtatcagcgtgaggcggtcaggtttgctgggaagtatgcgggctattattctgagcttggtcgtttgtggcgtgccggcaggatgagtgacacgcagtatgttcgtttgtgtgtggagttggagcgtgccggccatgatggttcggcatcgttggctgccaggtttgtgtcggattttcgccggttgaatggtgtggatccgggtttgattgtgtatgacgagtttgatgctgcggcggctttggctaggtctatttcgaccacgaagattcttaagagtgacccggatagggcgaatgacacgattgatgcgatggctgcgggttttgatcgggctgtcatgaatgctggccgtgacacggttgggtggtctgcgggtgcgcagggtaggtcgtggcgcagggtgactgatggtgatccgtgcgcgttttgtgccatgttggctacgaggtcggattatacgaccaaagagcgggcgcttactactggtcatacgcggcgtcataagcgtgccggtaggcgtccgtttggttcgaagtatcatgatcattgtggttgtacggtggttgaggttgttggtccttgggaaccgaatagggctgatgccgcatatcagcgggtttataagaaggctcgtgagtgggttgatgatcacgggttgcagcagtcgcctggtaatattttgaaggctatgcgtactgctggcgatatgcgatgaatggtttccggttgtgcatcgccggttatcggtgtacgggttgtctcccgcacggggggcggcaagaatggtattgttttccgcaaggagtgtaaggttaggctatggccgatcagagtgttgaggaacagaatgtcgacaatgatgttgttgagcccggaaagggtggagacgttgttgatgttgtgaaggatgggcaggctgccggcgatgatcatgccggtgatgtttccgtgaaggaggagtcttcttctggcacggattggaaggctgaggcccgtaagtgggagtctcgtgctaaaagtaatttcgccgagttggagaagcttcgcgcctcggatggtgatgcggggtctgtgattgatgatcttcgccgcaagaatgaggaactcgagggtcgtgttaacgagtttgttcttgagggtgtgaagcgtgatgtggctgccgagtgtggcctatcagctgatgctgtagcttttttgcacggtagtgatcgtgaggctttggtggagtctgctaaggctttgaagggtttgattgaccatagtggcggtgcgggtgtgcgccgtcttgcggggagtgcccccgtggatgatgttaaacgacgtgagggtgtcgcgtttgtggatgctcttgtcaataattctaggagatgatttgtgatggctgacgattttctttctgcagggaagcttgagcttcctggttctatgattggtgcggttcgtgaccgtgctatcgattctggtgttttggcgaagctttcgccggagcagccgactatttttggccctgtgaggggtgccgtgtttagtggtgttcctcgcgctaagattgttggtgagggcgaggttaagccttccgcgtctgttgatgtttcggcgtttactgcgcagcctatcaaggttgtgactcagcagcgtgtctcggacgagtttatgtgggctgatgctgattaccgtctgggtgtgcttcaggatctgatttccccggctcttggtgcttcgattggtcgcgccgtggatctgattgctttccacggtatcgatccagctacgggtaagcctgctgccgctgtgcctacttcgctggataatacgaagcatattgttgatgccacggattctgctacgaccgatctggtcaaggctgtcggccttatcgctggggccggtttgcaggttcccaacggtgtcgccctggatccggcgttttcgtttgccctgtctactgaggtgtatccgaaggggtctccgcttgccggccagcctatgtatcctgccgccgggtttgccggtttggataattggcgcggcctgaatgttggtgcttcttcgactgtttctggcgccccggagatgtcgactgcttctggtgttaaggctattgttggtgatttctctcgtgttcattgggggttccagcgtaacttcccgatcgagctgatcgagtatggtgacccggatcagacggggcgtgacttgaagggccataatgaggttacggttcgtgctgaggctgtgttgtatgtggctatcgagtcgcttgattcgtttgctgttgtgaaggagaaggctgccccgaagccgaatccgccagctggtaactgatttattgttgcgatgatgtgtcaatgtgcagggggtggtgttgatgggtatcattttgaagcctgaggatattgagcctttcgccgatattcctagagagaagcttgaggcgatgatcgctgatgtggaggctgtggctgtcagtgtcgccccctgtattgctaaaccggatttcaaatacaaggatgccgctaaggcgatccttcgtagggctttgttgcgctggaatgataccggggtttctggtcaagtgcagtatgagtctgcgggtcctttcgctcagactacacggtctaatactcccacgaatttgttgtggccttctgagattgccgcgttgaagaagctgtgtgagggtgatggtggggctggtaaagcgttcactatcacacccactattaatagtcgatatgcacattctgaggtgtgttccacggtgtggggtgagggttgctcgtgcggatctgatattaacggctacgctggccctttgtgggagatatgatatgaccagttttccttatggtgaaacggttgtgatgcttcagccgactgttcgtgtcgatgatcttggcgacaaggtggaagactggtctaggcctgtcgagactgtgtaccataatgtggccatctatgcttctgtttcgcaggaggatgaggccgcggggcgtgactcggattatgagcattggtcgatgcttttcaagcagtctgttgtgggtgccggttatcgttgcaggtggcgtatccggggtgttgtgtgggaggctgacgggtctcctatcgtgtggcatcaccccatgtccggttgggatgctggtacgcagatcaatgtgaagcgtaagaagggctgatgggttgtggctcaggacgtgaatgtgaagctgaacttgtcgggtattcgtgaggtgttgaagtcttctggggtgcaggctatgttggctgagcgtggcgagcgtgtcaagcgtgcggcctcggcgaatgtgggcggtaacgcttttgataaggcccagtatcgtaatggcttgtcgtcggaggtacaggttcaccgtgttgaggctgtggcgaggattggcaccacatataagggtgggaagcgtattgaggcgaagcatggcacgctggctcgttcgattggggctgcgtcgtgatcgtttacggtgatccgcgtgtgtgggctaaacgcgtgctcaaggatgatggctggctgtctgatataccttgtgtggggacggtgccagatgattttacgggtgatctgatttggttggctcttgatggtggcccgcagttgcatgtgcgtgagcgtgtttttttgcgcgtgaatgtgttttctgatacgccggatcgagctatgtcgttggcgcgtcgtgttgaggctgttctggctgacggcgtggacggtgaccctgtggtgtactgtaaacggtctactggccctgatttgctggttgatggtgcacgttttgatgtgtattcgctgtttgagctgatatgcaggcctgtcgaatccgggtaaacgttttgtttgatattgttgtttgttttttgtttgatattgtttttgggggttatgatggctgcaacacgtaaagcgtctaatgttcgctctgctgttactggtgacgtctatattggtaaagctcatgccggtgacactattgatggtgtgaagacggttcctgacggtcttaccgctttagggtatctgtcggatgacgggtttaagattaagcctgagcgtaaaacggatgatttgaaggcttggcagaatgcggatgttgttcgcactgtggctacagagtcgtctatcgagatttctttccagctgatcgagtctaagaaagaggttatcgaactgttttggcagccgaaggttactgccggagccgattcgggttcgttcgatatttcacctggtgccacgacgggtgttcacgccctgttgatggatattgttgatggcgatcaggttattcgctactatttccctgaggttgagttgattgatcgtgacgagatcaagggcaagaatggcgaggtgtatgggtatggtgttacgttgaaggcgtatcctgcccagattaaccataagggtgacgcggtgtctggtcgggggtggatgacggctttaaaagctgatactcccccggttcctccttctccgaagccggagcctcctaagcctgagccggatccgaatccgccgtctaataactgatacacatagtttgagggatcgttgatagatgagtgacacaggttacacgttgaagattggtgaccgtagctgggtgttggcggatgcggaggaaacagcgcaggctgttcctgcccgcgtttttcgccgtgccgccaggattgcccagtctggggagtctgctgatttcgcccaggttgaggtgatgttttccatgctggaggctgccgccccagaggatgctgtggaggctttggaggggcttcctatggtgcgtgtggccgagattttccgtgagtggatggaatacaagcctgaccagaaagcggcctccttgggggaatagtttggctccacggcctgattgatgattatcgtggggccatcgaatatgattggaggacccggttcggttgctctgtttatgatgttggtggccccgtaatgtgttggggtgaggctgtccggctggctggcgtgttgtgtagcgatacgtctagccagttggcggcccacgtgaatggctggcagcgcccgtttgagtggtgcgagtgggctgtgctggacatgctggatcattacaggtctgctaatagtgaggggcagccggagcctgtggtgaggcctacggatgagcgtagggcccggtttacgtctggacaggtggacgatattttggcgcgtgttcgtgccggtggcgtggtgtctcgcgagattaatattatggggtgaatagtgtatgtctggtgagattgcttccgcatatgtgtcgttgtatacgaagatgcctggccttaaaagtgatgttggtaaacagttgtctggggtgatgcctgctgagggtcagcgttcgggtagcttgtttgctaagggcatgaagttggcgcttggtggtgcggcgatgatgggtgccatcaatgttgctaagaagggcctcaagtctatctatgatgtgactatcggtggcggtatagctagggctatggctatcgatgaggctcaggctaagttgactggtttgggtcacacgtcttctgacacgtcttcgattatgaattcggctattgaggctgtgactggtacgtcgtatgcgttgggtgatgcggcttctactgcggcggcgttgtctgcttcgggtgtgaagtatggcgggcagatgacggatgtgttgaagactgtcgcggatgtgtcttatatttctggtaagtcgtttcaggatacgggcgctatatttacgtctgttatggctcgcggtaagttgcagggcgatgatatgttgcagcttacgatggcgggtgttcctgtgctgtctttgcttgccaggcagacgggtaaaacctcggctgaggtgtcgcagatggtgtcgaaggggcagattgattttaacacgtttgcggctgcgatgaagcttggcatgggtggtgctgcgcaggcgtctggtaagacgtttgagggcgctatgaagaatgttaagagcgccctgggctatcttggtgctacggcgatggcgccgtttcttaacggcctgcggcagatttttgttgcgttgaatccggttatcaagtctatcacggagtctgtgaagcctttgtttgcgtcggtggatcaggggattcagcggatgatgccgtctattttggcgtggattaaccgcatgccgggcatgatcacaagaatgaatgcacagatgcgcgccaaggttgagcagttgaagggcatttttgcgagaatgcatttgcctgtccctaaagtgaacttgggtgccatgtttgctggcggcaccgcagtgtttggtattgttgctgcgggtgtcgggaagcttgttgcagggtttgccccgttggcggttgcgttgaagaatctcctgccgtcgtttggtgctttgaagggtgccgctggcgggcttggcggcgtgtttcgtgctttgggtggtcctgtcgggattgtgatcggcttgtttgcggccatgtttgccactaacgcccagtttcgtgccgctgtgatgcagcttgtggctgtggttggccattattttttccagattatggccgctattgagacgttggtttttc

SEQ ID NO: 77 - DNA, 9542 bp, Pahexavirus sp.
  source 1..9542: mol_type = genomic DNA
gtctattagggcttacacggatgaggctgtgcgcacactgttggggcagtctgtgaatcgtgatttttatgcccacccgcaaaggtgggttacgggtgtgtcggctgacgagttttcgcagcctggctgggtcctgtcgatggcttctgtgtgggctgtggatagggatgatgacggtgacaccccgaatgtggggtcgtttcctgtgaattctcctacaccgtattcggatcagatgcggctgttggcgcagttgactgcgggtgaggctgcggttcctgaacgctatttcgggtttatcacgtctaacccgcctagtggggaggctttggctgctgaggagtctcggcttgtgaagcgtgccgagcggaggcagacgtcgtttggtcagggctggctgtcggttggtttcctggctgccagggcgcttgattcgagtgttgatgaggccgcgtttttcggtgatgtgggtttgcgttggcgtgatgcttcgacaccgactcgggcggctacggctgatgctgtgacgaagcttgtgggtgccggtattcttccggcggattctcggacggtgttggagatgttgggtttggatgatgtgcaggttgaggctgtgatgcgtcatcgtgccgaatcgtctgatccgttggcggcgctggctggggctatatcgcgtcagacgaacgaggtttgataggcgatggtttcgggtgttgcgtcgcggatggctgctgccgggtatcagcgtgaggcggtccgttttgccgggaagtatgcgggctattatgccgagcttggtcgtttgtggcattccgggaagatgacagatgcgcagtatgtgcgtttgtgtgtggagttggagcgtgccggccatgatggctccgcagctatggcgggcaagttcgtgtccgattttcggaagcttaatggtgtcgatcctggtttgatcgtgtatgacgagtttgatgctgccgccgcgttggctaggccgttttcgactatgaagatgatgaatagtgacccggatagggtgaatgatacgattgatgctatggctgcgggtgtgaatcgggctgtcatgaatgctggccgtgacacggttgagtggtctgctggtgcgcagggcaggtcgtggcgtcgggtgactgatggtgatccgtgtgctttttgtgccatgttggctacgaggtcggattatacgactaaggaaagggcacttactactggtcatactcggcgtcataagcgtgccggtaagcgtccgtttggttcgaagtatcatgatcattgtgggtgtacggtggttgaggttgtggggcgttgggagccctcctctgcggacaccgcatatcagcgtgtttatgagaaggctcgtgaatgggttgatgatcacgggttgcagcagtcgcctggcaatattttgaaggctatgcgtactgttggcgacatgagatgatggtttccggttgtgtatcgccggttatcggtgcacagggttgtctcccgcacgggggtcaacaatgttgtgttgttttccgcaaggagtgtagggttaggctatggccgatcaaaaagttgaagaacagaatgttgacaatgatgctgttgagcccggaaagggtggagacattgttgatgttgagaaggatgggcgggccgtcggcgatgatcatgccggtgatgtttccgtgaagggtgaggcttctggggcgtctggcacggattggaaggctgaggcccgtaagtgggagtctcgtgctaaaagtaatttcgccgagttggagaagcttcgtgcctcggatggtgatgcggggtctgtgattgatgatcttcgccgcaagaatgaggaactcgaagaccggatcaacgggtttgttcttgagggtgtgaagcgcgaggtggctgccgagtgtggcctgtcgggtgatgcggtcgctttcttgcacggcggcgatcgtgaagcgctggtggagtctgctaaggctttgaagggtttgatcggccatagtagtggtggtggcgcgggtgtgcgccgtcttgcggggagtgcccccgttgatgatgttaaacgacgtgagggtgtcgcttttgttgatgctcttgtcaataattctaggagatgatttgtgatggctgatgattttctttctgcagggaagcttgagcttcctggttctatgattggtgcggttcgtgatcgtgctatcgattctggtgttttggcgaagctttcgccggagcagccgactattttcggccctgtgaagggtgccgtgtttagtggtgttcctcgcgctaagattgttggtgagggcgaggttaagccttccgcttcggttgatgtttcggcgtttactgcgcagcctatcaaggttgtgactcagcagcgtgtcagcgacgagtttatgtgggctgacgctgactaccgtctcggggtgcttcaggatctgatttctcccgctttgggtgcttcgattggtcgcgccgtggatctgattgctttccatggtgttgatcctgctactggtaagcctgctgctgctgtcaaggtgtcgctggataagacgaagaagacggttgatgccaccgattccgctacgactgatcttgtgaaggctgtcggcctgattgctggtgctggtttgcaggttcctaacggggtcgccctggatccggcgtttgcttttgctctgtctactgaggtgtatccgaaggggtctccgcttgccggtcagcctatgtatcctgccgccgggtttgccggcctggataattggcgtgggctgaatgttggtgcttcttcgactgtttcgggtgccccggagatgtcgcctgcctcgggtgtgaaggctattgttggtgatttctcgcgtgttcattggggtttccagcgcaatttcccgatcgaattgatcgagtatggtgacccggatcagactgggcgtgacttgaagggccataatgaggttatggttcgtgccgaggctgtgctgtatgtggctatcgagtcgcttgattcgtttgctattgtgaaggagaaggctgccccgaagcctaatccgccggctggtaactgatttattgttgcggtgatgttttctatgtgcagggggtggtgttgatgggtatcattttgaagcctgaggatattgagcctttcgctgatattcctagagagaagcttgaggcgatgattgccgatgtggaggctgtggctgtcagtgtcgccccctgtatcgctaaaccggatttcaaatacaaggatgccgctaaggctatccttcgtcgtgctttgttgcgctggaatgatactggcgtgtcggggcaggtgcagtatgagtctgcgggcccgtttgctcagactacacggtctaatactcccaggaatttgttgtggccttctgagattgtcgcgttgaagaagctgtgtgagggtgatggtggggctggtaaagcgttcactatcacaccgaccatgaggagtagcgtgaatcattctgaggtgtgttccacggtgtggggtggcggctgctcgtgcggctcgaatattaacggctacgctggccctttgtgggagatatgatatgaccagttttccttacggtgaaacggttgtgatgcttcagccgactattcgtgtcgatgatcttggcgacaaggttgaggattgggggcatcctgtagaaaccgtgtaccataatgtggccatctatgcttccgtttcgcaggaggatgaggcggcaggccgtgactcggattatgagcattggtcgatgcttttcaagcagcctgtcaagggtgccggttatcgttgcaggtggcgtatccggggtgttgtgtgggaggctgacgggtctcctatggtgtggcatcaccccatgtccggttgggatgctggtacgcagatcaatgtgaagcgtaagaagggctgatagattgtggctcaggatgtgaatgtgaagctgaacttgccgggtattcgtgaggtgttgaagtcttctggggtgcagtcgatgttggctgagcgtggtgagcgtgtcaagcgtgcggcctcggcgaatgtgggcggtaacgctttcgataaggcccagtatcgtgcagggttgtcgtcggaggtgcaggttcaccgggttgaggctgtggcccgtattggcaccacatataagggtggtaaaaggattgaggcgaagcatggcacgttggcccggtcgatttgggctgcgtcgtgatcgtttacggtgaccccagaaagtgggctaaacgtgtgctcaaggatgatggctggctgtccgatataccgtgtactgggacggtgcctgaccggtttgagggtgaccttatttggttggctcttgatggtggcccgcagttgcatgtgcgtgagcgtgtttttttgcgcgtgaacgtgttttctgatacgcctgatagggctatgtctttggcgcgtcgtgttgaggctgttctggctgacggggttgatggtgacccggtggtgtactgtcgacggtctactggccctgatcttttggtggatggtgcacgttttgatgtgtattcgctttttgagctgatatgcaggcctgtcgaatccgagtaaacgttttgttttgatattgttgtttgttttttgtttgatattgtttttgggggttatgatggctggaacacgtacagcgtctaatgttcgctctgctgttacgggtgacgtctatattggtaaagctcatgccggtgacactattgatggtgtgaagacggttcctgacgggctgactgctttagggtacctgtctgatgacgggtttaagattaagccggagcgtaaaacggatgaccttaaggcttggcagaatgcggatgttgttcgcactgtggctaccgagtcgtctatcgagatttctttccagctgatcgagtctaagaaggaggtcatcgaactgttttggcagtcgaaggttactgccggagccgattcgggttcgttcgatatttctcctggtgccaccacgggtgttcacgccttgttgatggatattgttgatggggatcaggttatccgctactatttccctgaggcggagcttgttgatcgtgacgagattaagggcaagaatggcgaggtgtacgggtattgtgtgacgttgaaggcgtatcctgcccagattaataagaagggtgatgcggtgtctggtcgggggtggatgagggctttaaaagctgatactcctccgactcctcctccggccccgaagccggagcctcctacgccgcctaagcctgagccggatcctaatcctccgtctgagaactgatacacgattttaggggattgttgatagatgagtgacacaggttacacattaaagatcggtgaccgtagctgggtgttggcggatgcggaggaaacagcgcaggctgttcctgcccgcgttttccgtcgtgccgctaagattgcccagtctggggagtctgcggatttcgcccaggttgaggtgatgttttctatgttgggggctgccgccccggctgatgctgtggaggctctggaggggcttcctatggttcgtgttgccgagattttccgtgagtggatggaatataagcctgacggtaagggtgcctcgctgggggaataatttggctccacggcctgattgatgattatcgtggggccatcgaatatgattggaggacccggttcggttgctcggtttatgatgttggtggcccgataatgtgctggggtgaggctgtccggctggctggcgtgttgtgtaccgatacgtcgagccagttggcggcccacctgaatggttggcagcgcccgtttgagtggtcggagtgggcggtgttggacatgctggatcattacaggtctgctaatagtgaggggcagccggagcccgtggcgaggcctacggatgagcgtagggcccggtttacgtctgggcaggtggacgatattttggcgcgtgttcgtgccggtggcggggtgtctcgcgagattaatattatggggtgaaaagtgtatgtctggtgagattgcttccgcatatgtgtcgttgtatacgaagatgcctggccttaaaagtgatgttggtaaacagttgtctggggtgatgcctgctgagggtcagcgttcgggtggtctgtttgctaagggtatgaagttggcgcttggtggcgccgcaatggtgggtgccatcaatgttgccaagaagggtttgaagtctatctatgatgtgactattggtggcggtattgctcgcgctatggctatcgatgaggctcaggctaaactgactggtttgggtcacacgtcgtctgacacgtcttcgattatgaattcggctattgaggctgtgactggtacgtcgtatgcgttgggggatgcggcgtctacggctgcggcgttgtctgcttcgggtgtgaagtctggcgggcagatgacggatgtgttgaagactgtcgccgatgtgtcttatatttcgggtaagtcgtttcaggatacgggcgctatttttacgtgtgtgatggctcgcggtaagttgcagggcgatgacatgttgcagcttacgatggcgggtgttcctgtggtgtctctgttggctaggcagacgggtaaaacgtctgctgaggtgtcgcagatggtgtcgaaggggcagattgattttgccacgtttgcggctgcgatgaagcttggcatgggtggtgctgcgcaggcgtctggtaagacgtttgagggcgctatgaagaatgttaagggtgccctgggctatcttggtgctacggctatggccccgtttttgaacggtttgcggcagatttttgttgcgttgaatccggttattaagtctatcacggagtctgtgaagcctttgtttgcgtcggaggatcaggggattcagcggatgatgccgtctattttggcgtggattaaccggatgccggctatgatcactcgaatgaatgcgcagatgcgcgctaaggtggagcagttgaagggcatttttgcgagaatgcatttgcctgtccctaaggtgaatttggctgccatgtttgctggcggcaccgccgtgttcggtgttgttgctgcaggtgttgggaagcttgttgcggggtttgccccgttggaggtgtcgttgaagaatctgctaccatcgtttggtgctttgaagggtgccgccgggggtcttggcggcgtgttccgtgccctgggtggccctgtcggtgttgtgatcgggctgtttgctgccatgtttgctacgaacgcccagttccgtgccgctgtgatgcagcttgtggctgtggttggccaagccctgggccagattatggccgctcttcagccgctgtttggtttggttgcggggctggtggcacggttggcgccagtgtttgcccagattatcggcatggttgccggtttggctgcccagttgatgcctgtgattggtatgctggtggcccggctggtgcctgtgatcacgcagattattggcatggtgacgcaggttgcggccatgttgctgcctacgttgatgccggttattcaggctgttgttgctgtgatacggcaggttgttggtgttgtgtcgcagttggtgccggtgttgatgcctgtgattcagcagattttgggtgctgtgatgtctgttctgccgcctgttatttgtttgatccggtcgttgatgcctgtgattgcggcggttatgcgtgtggtggttcaggttgttgcggttgtgatacaggtggtggcccgtattcttgctgttgtggctccgatggtggcggctgtggtcgggtttgttgcccgtattgttggtgctgtcgtgtcggctgtggctcgtgtgattgctgctgttgcccgtgtcgtctcgtgggttgtggcccattttgtgtctggtttggcgcgtatgggttcggtggttcaggctggctggaatcatattagggcgtttacgtctgcgtttattaatggtttcaagtcggtgatttctggcggcgtgaatgctgttgttgggttttttgcccggctgggttcttcggttgcctcccatgtgaggtctggttttaacgcggctcgtggcgctgtttcttctgcgatgaatgctatccggagtgttgtgtcttcggtggcgtccgctgttggcggatttttcgggtcgatggcttctcgggttcgtggtgctgcctcgtccgggtttaacgctgcgaggggtgcggcttcttctgctatgcacgctatgggctcggctgtgtctagtggtgtgcatagtgtgataggttttttccggaatctgcccagcaatattaggggcgccctgggtaacatggggtccctgttggtgtctgctggccataatgttgttgccggtttgggtaacggtattaagaatgctatgagtggcctgttggatacggtgcgtaacatgggttcccagattgcgaatgctgcgaagtctgctttgggtattcattcaccgtcgagggtgtttcgtgatcaggttggccggcaggttgttgccggtttggctgaggggatcaccgggaatgctggtttggcgttggatgcgatgtcgggtgttgcttcgcaacttccggatgctgttgatgcccggtttggcgtgcgatcgtctgtgggctcgtttacaccgtatggcaggtatcagcgcatgaatgataagagtgttgtggtgaatgttaacgggccaacctatggggatcctaacgagtttgcgaagcggattgagcggcagcagcgtgacgcgttgaacgcgttggcttacgtgtgattgcggggtgtggttcatgtttattcctaacccgtctgatcgtgccggtttgacggtggattggacgatgtttccgttgtttcgtaatgatccggagcgtgtgcttcatttgacggattatacggggtcgtctccggtgatgttgttgaatgattcgttgcgcggcctgggtatgcctgaggtggagcagttttctcaaacgcatgttggggtgcacggctcggagtggcgcgggtttaatgtgaagcctcgcgaggtgactttgccggttttggtgtcgggtgtcgacgaggatcctgcaggcgggtttcgtgacggttttttgaaggcgtatgacgagttgtggtctgcttttcctccgggggaggagggtgaactgtcggtgaagactcctgccggcaaagagcgtgtgctgcggtgccggtttgattcggctgatgacacgtttacggtggatccggtgaatcgtggctatgcgcgctatctgttgcatttgacggcttatgacccgttttggtatggggatgagcagaggtttcgttttagtaacgcgaagttgcaggattggttgggtggtggccctgttggcaaggatggtaccgcgtttccggttgtgttgacgcctggtgttggttcgggctgggataacttgtcgaataggggtgatgttccggcgtggcctgtgattcgtgaggagggacccctggagtcgtggtgtgtgcagatttttggttttggtgggtcttt

SEQ ID NO: 78 - DNA, 17736 bp, Pahexavirus sp.
  source 1..17736: mol_type = genomic DNA
gtgtgaggagccggtctatattgtctattatcgggtatcctcctccttctgggtgttggtttgtttgcggcggtagtctttgatgacggtggcggagatggggtatccggcttcagtgagcatttgggctagctgtgtggcggggatggacctgtcggcgagtacgtctgcggctttatcaccgtagcgttggatgagggtttcagttttggttgccatgatgtcctaggggttgtgtggtgggttgccatcctgtgcggcagtcgccgtcgtgtcctggtttgcgggtgcaccatgatacgttgccggcattgtggatgatggcacggccgcatatgacgtcatgtaggtgttcgggaaactcgttgttgttgtcaccgtacatgtcgatcaagtgttgggttttagtaaccatcatgtctcctagatgtgaaagagtgtgcaaatactatgctggtgtcatggatgtttatgcgggtatggttttcatcaccttgctgaacgttacttggttactgtacatcatctgggtgatttcctgatccgttttgtcggggtgctgttttcgcaggttcgcccattggcaggcgttgtcggtttcctgctgtaaacgtgtcaggtgttgttcgttgatgatgtgtttccacatggtccatgacacgtcgagccggttaaggatctcgatggctggcacgttgaaggagttgaggaagagtatttcctccgtgtagtagtctttttcgtattggtcccatccgcttcggtgcctgttgggctggtttttggggtaggcttcccggcatactttgtgcaaacgtttggccatgtctttgggtagcctaatgtcggggttggcgcggatcatggatcgcatcccatcataggtggtgccccaggtgtgcatgatatgtagtgggtcttcaccatcagcccatttttctgcacagatggcgaggcggatacgcctcctggcggccttactcgtgtcgcggcggccggggatggggcatgtgtcgagggggtccatgatgttttctatgcctttcttggagtgatgttttgtttgtctggttttattgtagcactgtgttgagggcttgtgtcaaccctgttttgccggcctgcaggtaggtgtctgtgacatctccgacagtgaggggcacgtggatggcttgggggagtgcggtttggagggtttgggccatctggtcgcctgctttgtcggggtcggaccagatgtagatgcggtcgtagccttcgaagaatttggtccagaaagtttgccacgaggtggccccgggtagggctacggccggccatccgcattgttcgaggatcatggagtcgaattcgccttcgcaaatgtgcatttcggctgccgggttggccatggcggccatgttgtagatggagcctgtgtcccctgccggggttagatatttgggctggttgtgggttttgcaatgatgctggagtgagcagcggaaacgcatttttcgtatttcggctgggccgccccagacggggtacatgtaggggatggtgatgcactggttgtagtcttcgtggcctgggttggggtcgttatcgatgtatccaaggtggtggttgcgtgctgtttcttcgctgatacctcttgctgagaggaggtcgagtatgttttcgaggtgtgtttcgtagcgggctgaggctttctggattcggcggcgttccgcaaggttgtagggttgtatgctgtcgtacattcgggtttctttcttcgagttgttgtttcagtttgtggagtccgcctccgataccgcatgtgtggcagtaccagacgcccttgtcgaggttgatgctcatggagggctggtggtcgtcgtggagcgggcagaggatgtgttgctcgttcctggacggattgtagcgtatctggtaggtgtcgaggaggcggcaggtgtcagaggtgtgggaggagctcgttgagggttgataccacataggcttcgctccagggtttgttgcgttgtttcatcactacgagtccgatggtggaattgttttgtttgtttcggtgtgtttcgtagttgcgtgcctcccggctggcttgtttcacgaattcggcgaggtgtgcccgtcctgctttggcttcgatcacataggttttgtggctggttgtgaggatgaggtcgccttcatcctctttaccgttgaggtggaggcgttctatatcatggccggtgtcgcgtagttggtggaggagtcgtgtttcccattcggctccggcccggcggttgcgtgactgttgtgtcgacatgatagtcctttgtgtgttggggtcatgttccatggctgtttttcggcgagtggcccgaagaatgtgtattcggggtaggctctgagtctttcgtatcgggttccgtctgggctggatttgcctgtgcgctgtttcaacactgcgatgcgtgcctcggcggggatggtgagcccgttgccgttatcttcgccacgatacagggagtctcccaatatgagttgtggtttttcggagaggccgtttttgatttcccgcctagccggggggtgttcgatgtcggagccggttttgtcggttgcgtggtgtgtgacaataatggtggagccagtatctctgcccaatgctgtgatccattgcatggcttcttgctgtgcctggtagtcactctcgcagtcttggatgtccatcaggttgtcgatgacaatgagtggtgggaaggtgttccacatttccatgtaggcttgtagctccatggtgatgtctgtccaggtgatgggtgactggaatgagaatgtgatgcgttcgccgtgccggatggtgtctcgatagtattctggcccgtagtcgtcgatgttgtgttgtatttcggcggttgtgtgttgggtgttgagtgggatgattcgtgtggaggcctcccagggtgtcatgtccccggatatgtagagggtgggctggttgagcattgctgtgatgaacatggctagccctgatttttggctgccggagcgccccgcaatcatcaccagatcccctttgtggatgtgcatgtccaggttgtcgtataggggtgcgagttgtggtatgcggggcagctcggcggctgtttgggaggctctctcgaaggatcgttggagagagagcatcggagccttaatctatctgtctatcggttggatgatgttttggtggtcagatggagtcgatatcgatgtcagcatcagttgaggctgtggtgtcgtctagctggccgttatcgcgtttgtctacgtattcggcaaccttatcgtagatggcgtcgtctaatggtttgaggacgaccgcattgaagccgtttttggtgcgtacggtggcgagtttgaaggcctgctcctcgccaaggtatgcttctaggtcgcggatcatggagtgtgggcggtcgttgttgccgcgtgctttttcgataatggcgttggggatggtttctggggtaccgttgttgaggtcgtctagggtgtggaagattgtgacatcagcgtaggtgcggtctgcgacctgtccaccgtagccttcggtgttgtgttctacgtcgtggactttgaaggcgatggcggttgcgtcttggtttcgggaggggttgaagaaggtgccgttgctgttgttgttgcggtagtttgcgagtcccattgttgtttcctttactgtttgtgttgttttgtttgttggtttgtgtcggttttatcgggtgaggctgtttcgtttgctgcggaacgcctctgacacgtcactgttactagtgatggtcctcttgtactgtttgaggaggtcggctagctgtgccttgcttgtggcattgttaattttgtcgatgatggtgttgtttccttctgaggcgatgttgtctacgtagtctttggcggcctgattgtagcgatcttggaggatgatggatgctgtggcgatcagggttgccaggtcccagttccttgccgcggagctgtttttgagtccgcctagcaggtcgatgatagtcttctttacctggtcgggggtgtctgcgcggatgacggtccatggggcggcgtagtcgcctccgtatttgagtgtgacggtgaatcggtcgtcgtctgtgttgtcggtcactggtgctccttgctttcttgtgttggggctgtgatggtggtttctatagggtacctgtaggcgtctttcccgttgacagcccagcaggcgtctctgacggggcatcctttacagagtgttgtgacgtggggtacgaagatgccttgactgattcctttcattgcttgactgtacatggatgatacatgccggtaggtgttgttgtcaaggtcgtatagttcggttgctgtgccctgtgcgggggatttatcgtcgttgcggctggtggccggcgtccaaaacatgccttttgtcacatcgttgccgtgttggttgagcatgtaccggtaggtgtgcagctgcatactgtcggcgggtaggcgtccggttatgaggtcgagaatgaaggtttcgccagtgtcggtgtcggtgaaaacgcggtcgatgtagccaacgatctgggtgccgtcgtcgagggtggtttctaccgggtattcgatgccaggctggccgtcaataacagcggtgatgtattctgggtggttgcgcctccatgttttccaccggtccacaaaggtggggccgtatatcatccaccaattgtagtcttttttgtgtggcccgcccgactcgcgcatgtttttgcatattctgccggagggtttgatttcggtgccttctgattcggagagggcgacttgggtgtcgaaaatgtttgtgaaggatgagagtttgtctggcagtgcagggtattcgtcgggattgtacaggtgtaggtcgtattgttcggtgatgtggtgtatggcgcttccggcgatggtggcgcaccaggtgtggtgttgggcgtggtagccgtgggataggcgccatttttctccgcattcggcccactgggtgagtgaactgtaagatatgtggcctggatggtcgatggtggatggtttttgtgctagaggcattacttgtcgcctttatgggtgttccaggggttgcgggtgtctaccccggcatcgtgttgctggtaggcgaggagtgcgaggcagtgccaggcagcatgggccaggtggggtagcccggattcataatcgaggttgttgccttgctgccatgatagtaggtgcctgtagagggcgtcgacgctgtggctccacgggtatcctcctgtccagttgttgtcgccgtatttggtggctccgtagcctgccacggagccgagggcgtgtaaggctgcggggtcgatgagggagagcctgcagagtttcaattcttttcgggcaccagtatcagggtcggtgtacatgctggttggttcatccatggtgtgtgtgctccttgagtgtgggttactggttggggttgtgggcgagtgctacggcgagaataatgatggcgagggtttcggcgatcagtatgggtgttgtgatcatttgttgtttttgggctggtaggtgagtgtggaggcacccaggagggtggtgagggcgcatgcggcgatgatggcgagggctgccttgtgtggggtgccggtcgcgtacatccatgtgatgatgccgccttggatccaggctaggctggtgaagaacgtttcgtatctgtgcagctcaatgttattgttgggtgtgttcatgcttgctcctgaagaatggtgttgatggttttataaatgttgtacaggtcggtttcaatagataacagttggtggatttcgtgatcgagatcaatgtccgggttgagagtgttgatgcgggaggcaatatcggtggctgtgcgtagtgtgccgccggtgtggtgaataatgtgtgccgtgtcggcgagtccggtggtgacagcgtagtgggagaggagaggcatagctggggggtgctccttggcgggttactgttgcgggttgatattgaggtcggtgacgtggggtgtgttttctgttccggtgacgaggcagtgaacagtgacagggagtttggaggctcccggctgacggatggtggcgccgtagacgatggagaaggtgtctttgccaataattttgtggagttggaggtcgatgtcggggttgccgttccatttgacgccttgcgtggcggcctgctgttcggcttagcggttgcaggtgtgtgcggcggtgatcatggtgagaccttgtgaggtttcttcaccccgtgtttgggcttgcttgtgggctttggcctgctcggctcgcagtgactgttctgcggctgcctgccgtgctttcttttcggctttgcgcagttggacggttttgggggtccattcggtgttggctgtggtggcctgtggtgcgggttgtgaggcgagtggcggattgtcgtcgggtgctgggaggaaagagcatgcggcgatgatggcggctgtgattccggcgatggtgtagcctgttttcttgttcatgactgttgtcccctttccggggtgttgttcgttgctgacatggttaatatttccagactggactaccactgtcaacgtttcgctcagtagtctcgagcgtatgtggtttggctaggggtgatgcacgctttgaggatggcctggatgtcaatgtttgcgatgctttgggcgagcctggtttgctcggcgaggctcaaatagttcactgtgttgtgggtgtagacggccccgtcggcggtgagccaccagtcgggtcgaagggtgtggatggcctcttccacagagtgccggtatagtcctgccgccctggcgaagttgatgtgcgggttggggtcgtcttcgaggatggtgaggtcaaggatcccggctgctgttggggtgtcttggtagagctgcgagtagtgtgccgtaacgatagtggccaacatggatgtgccttcctaggggtgaaagggtggggcccccatcgtcgggggcccttgtgtgtttttgttgtgttacttggtggcttcttggaggatggtggcggtgtcgatgtcatcgatgtcccaagcgaggtcttcggcctcgtctggggtgagtggctgcgagttgtgtgggccggtgactgatccgtcgagggcgagggtccagtcggggcggtagtggcgcagggcttcttccacagcgtgccggtaggcgtgtttggcggcgtccaggttgatgtggcaggcgtgccgtccggctagctgggtgaggtcgagggggtcgtcctcggtgtggctgtagagggaggtgatggatggggtgatgagtgtggtggccatgagagtgtgctcctttcggtggtgtatgggttgttgtggtttctagagtgtgtaggttgcaaccgggagtcaaggtggcgctcattcggattgagcgtttcatgctggagtgtcgggtgtgacagatgtcactcaagcatttactgcctctctcagcgtctcaaatcttctaggggtaggattatgcagggttaaccctgctgatcgattctagggcccttctagggcgtctcagaggtatgtctgggtgatagcaggttcggtagatgacccggcagatctaccttggctttcatgacggggggtcgaggtgccatatctgggcatggaatctacacccccatactgtgtgagatgtatcacatcctcctggcttagtgtgcacccccgaggctactctgtcgatctagcgtgaggggtgtagcccagaaataccgtttaaagctgtgacacggcgcctaggagcgccttacagggtgggggctaggtatttatacccccaagcaattctgatcgattctagacgcctccaggagactgatacgcgatcaaccatctcggcatagatcatcaacccctatcctggttagctaagcctcaactatgtggacagtgtgggatactgtgggggaagaaggacgcggtaaaagaaagaagggggcatcagccttagggtcttagcactgatggacttagcaccgagcccctcaagggctcggcatcagcccgaacaggctcagctcatcaggcacagccctgaaaggagtacacaccatcagggaaggcttgagagtacgaggagccctagcgacgagtactcgaaagcctgagggaacaccatcagcactgatgggcctagcgtgttcggaaaggacacaagggtacagtgtgacagctgttcgggggtgaaacccgttctgactaggggtttcagtcttaaccaccctcaaaggttacaagactctaagaaaatttaaggaaaagtttaggtttaatttttggacctttactaccaaaaacacccgtttacacccctcaaacccgcctatagagccaaaaccaccagtttgactcatcccaggtggggtatgataggctggacaggtagccagctggacgcaaggccagaaagtgctaacgcacttcccgacctcgcttaccatcagtctaccaaacacttaaagacctaagggcttagcgctaaggtgctgatagcttagcaccgagcccctcaagggctcggcatcagtcttaaagtcttaggtactttaagtagctttaaaaccttaaaggcttagcccttaaggatctaagttactataaaagctttaagagcttaacacttaaagttatcaataaacattaaagctttaaagtcttaaagtaaatatataaccttaacacttaagttaagtataaaaccttaaaggcttagcacttaaggatataaacttcacatcagtgtttaagactttaaaacttaaaataactattaagacttaaaggcttataggttttaaacacttaaagtaactataaaacattaaagaccttaagtacttaaagttaaccatcagtcttaaactttaatattataacctataagtcttaaagcttataagttataaaagttttagaagagctaaggggttaacttctttacttctcttctctctttggttctttctctcttctcttcttttcttcatcaggggagaagaggaaccttttgccgtcaacgccgatgggcttttcaccgtgtgactcgtgtgcttctggtcgcacgctaccatcgcacactccccacactctgacacccgtgtccctttcaggcttagcgtgcttagctgaaggcgtacggcgtgtcactccaacacccttaacaccaggtaagacttaaagtgtatattatatgtagaagactttaaaaaccttaaggtgttcccgcttagcctgtgtcctttagcgctaggcgctaagcgctaagctgtgaaacgcgaacacccatccacccccttttttctttcgtgtccttcttcttttgacacagctggggggcgatgtgatctttttcacacccaggggggtagtggagaaaacaaccaccccggcacaaacagaacaccccctcaaacgaacaaaacagccccctagaatcgaatagtagggcaagggcaaggtattcctacccccaacacgttccaggctgttacaggagcaatgagaggcccacaggggccataggagatcaggggacgtgatgggacgcaccaaccgcacagcatcctccgcccaccggcgctggcgggcgcgactcatcacccaagcacgcaagcaaggccaaaccgaatgcccactctgcggagcccagttagcctgggacacacacgacctgccaaccagccccgaagccgaccacatcacacccgtcagccgcggaggactcaacaccctcgacaacgggcaaatcatctgcagaacatgcaacagaagcaaaggcaatcgcagcgaaccaaacatcaaattccaacaacaaaccacaaaaacattgattccatggtgaaaaacccgccaacccccaccggggacaccccctgcacaccagtgcaagacctcgtacggcttagtgaaatacctcccttttgtggatttgtctgtttgtcgactttttgtgttggtggtgagtgttgtgcagcctgagcttcctgatagtcgtgagtggtgtggggagacgcgtcgttggtggtgtgtgtggggtgaggatagtcgcgcgcagtacgtgtctgatgaggagtggctgtctctcatggatgctgcggtgattcatgatgtggtgtggcgtgagggtcgcgctgatttggtggcttcgcttcgtgctcatgtgaaggcttttatgggcatgttggatcggtattcggttgatgtggtgtctggtggccgcggtgggggttctgcggtggcgatgattgaccggtataggaagcgcaagggggcctgagtaggtgtctggtgttgttgggtctcaggttcctcgtcatcgtgtggctgcagcgtattcggtgtctgcgggcggggatgctggggagcttggtagggagtatgggctgacgcctgatccgtggcagcagcaggtgttggatgattggcttgctgtgggtgcagggggtcgtcttgcttcgggtttgtgtggggtgtttgtgcctcgccagaatggcaagaatgctattttggagattgtggagttgtttaaggcgactattcagggtcgccggattttgcatactgctcacgagttgaagtcggctcgtaaggcgtttatgcggttgaggtcgttttttgagaatgagcggcagtttcctgacctgtttcgtatggtgaagtcgattcgtgcgacgaatggtcaggaggctattgtgttgcatcatccggattgtgccacgtttgagcgtaagtgtggctgtccgggttggggttcggttgagtttgtggcccgtagccgtggttcggctcgcgggtttacggttgatgatttggtgtgtgatgaggctcaggagttgtcggatgagcagttggaggctttgctacctacggtgagcgcggctccttcgggtgatccgcagcagatttttttgggtacgccgcctgggccgttggctgacgggtctgtggtgttgcgtttgcgtggtcaggctttgtcggggggtaagaggtttgcatggacggagttttcgattcctgacgagtctgatccggatgatgtgtcgcggcagtggcggaagttggcgggggatacgaatccggcgttggggcgtcgcctgaattttgggaccgtaagcgatgagcatgagtcgatgtctgctgccgggtttgctcgggagcggcttggctggtgggatcgtggacagtctgctacgtctgtggttcctgctgataagtgggctcagtctgcggtggatgaggcgagtctggttggcgggaaagtgtttggtgtctcgttttctcgttctggggatcgggttgcttaagcgggtgccggccggactgatgctggggttcatgttgaggttattgatgggctgtcgggaacgattgttgatggtgtgggccggttggctgactggttggcggttcgttggggtgatactgacaggatcatggttgccgggtctggtgcggtgttgttgcagaaggcgttgacggatcgtggtgttccgggccgtggcgtggtggtggctgatactggggtgtatgtggaggcgtgtcaagcctttctggaaggtgtcaggtctggtgttgtgtctcaccctagggctgattctcgccgtgacatgttggatattgctgtgaggtcggcggttcagaagcgtaagggttcggcttggggctggggctcgacgtttaaggatggttctgaggttcctttggaggctgtgtcactggcgtatcttggtgcgaaaacagttaaagtgaagcggcgtgaacggtcgggtaggaagcgggtgtctgtggtatgaactcggatgagttggctctgattgagggcatgtttgatcgtatccaaaggttgtcttcgtggcattgccttattgagggctactatgaggactctaatcgggtgcgtgatttgggggtggctattccgccggagttgcagcgtgtgcagacggtggtgtcgtggcctggtatagctgtggatgctttggaggagcgtctggattggcttggctggactaatggtgacggctacggcctggatggtgtgtatgctgcgaatcgtctatcaaccgcgtcatgcgacgtccaccttgatgcactaatttttgggttgtcgtttgttgcgatcattcctcatggtgatgggtcagtgtcggttcgtccgcagtcaccaaagaattgtactggcaagttttcagctgacgggtctcgtttggatgctggccttgtggtgcagcagacgtgtgatcctgaggttgttgaggctgagttgttgcttcctgatgtgattgttcaggtggagcggcgtgggtctcgtgagtgggttgagacgggccgtatcgagaatgtacttggggcggttccgcttgtgcctattgtgaatcggcgcaggacgtctcgtattgatgggcgttcggagatcacccggtcgattagggcttacacggatgaggctgttcgcacactgttggggcagtctgtgaatcgtgatttctatgcctatccgcaaaggtgggtgactggtgtgtcggctgatgagttttcgcagcctggttgggtgctgtcgatggcttctgtgtgggctgtggataaggatgatgaaggtgataccccgaatgttgggtcgtttcctgtgaattcgcctacaccgtattcggatcagatgcgtttgttggcgcagctgactgcgggtgaggcggctgttccggaacgctatttcgggtttatcatgtctaacccacctagtggggaggctttggctgccgaggagtctcggcttgtgaagcgtgctgaacgcaggcagacgtcgtttggtgagggctggctgtcggttggtttcttggctgccagggcgcttgattcgagtgttgatgaggccggtttttttggtgatgttggtttgcgttggcgtgatgcgtcgacgcctaccagggcggctacggctgatgctgtgacgaagcttgttggtgccggtattcttccggcggattctcgtacggtgttggagatgttgggtttggatgatgtgcaggttgaggctgtgatgcgtcatcgtgctgagtcttcggatcctttggcggcgctggctggggctatatcgcgtcaaactaacgaggtttgataggcgatggcttcgggtgttgcgtcgaggcttgcggcgactgagtatcagcgtgaggcagtcaggtttgctgggaagtatgcgggctattatgccgagcttggtcgtttgtggcgtgccgggaagatgagtgacacgcagtatgtgcgtttgtgtgtggagttggagcgtgccggccatgacggttcggcctcgttggctgccaggtttgtgtcggattttcgccggttgaatggtgtggatccgggtttgattgtgtatgacgagtttgatgctgcggcggcttttgcgaggtcgttttcgactatgaagattcttgagagtgacccggatagggcgaatgatactattgatgcgatggctgcgggtgttaatcgggctgtgatgaatgctggccgtgacacggttgagtggtctgcgggtgcgcagggtaggtcgtggcgcagggtgactgatggtgatccgtgcgcgttttgtgccatgttggctacgaggtcggattatacgaccaaagagcgggcgcttactactggtcatacgcggcgtcataagcgtgccggtaggcgtccgtttggttcgaagtatcatgatcattgcgggtatacggtggttgaggttgttggcccttgggaaccaaatagggctgatgccgagtatcagaggacgtatgagaaggctcgtgaatgggttgatgatcatgggttgcagcagtcgcctggcaatattttgaaggctatgcgtactgttggcgacatgggatgatggtttccggttgtgcgccgccggttatcggtgcacagggttgtctcccgcacgggggtcgacaatgttgtgttgttttccgcaaggagtgtagggttaggctatggccgatcagagtgttgaggaacagaatgttgacaatgatgctgttgagcccggaaagggtggagacgttgttgatgttgtgaaggatgggcaggcttccggcgatgatcatgccggtgatgtttccgtggaggaggagtcttcttctggcacggattggaaggctgaggcccgtaagtgggagtctcgtgctaaaagtaatttcgccgagttggagaagcttcgcgcctcggatggtgatgcggggtctgtgattgatgatcttcgccgcaagaatgaggaactcgaaggccggattaatgggtttgttcttgagggtgtgaagcgcgaggtggcttcagagtatggtttgtccagtgatgcgatcgctttcttgtcgggtggcgataaggagtcgcttgccgagtctgcgaaagctttgaagggtttgatcgaccatagtagtggtggcgggggtgtgcgccgtcttgcggggagtgcccccgttgatgatgttaaacgacgtgagggtgtcgcgtttgtggatgctcttgtcaataattctaggagatgatctctgatggctgacgattttctttctgcaggtaagcttgagcttcctggttctatgattggtgcggttcgtgatcgtgctatcgattctggtgttcttgctaagctgtcgccggagcagccgactatttttggtcctgtgaagggtgctgttttcagtggtgttactcgcgccaagattgttggtgagggcgaggttaagccttccgctagcgttgatgtttctgcgtttactgcgcagcctattaaggttgtgacgcagcagcgtgtctctgacgagtttatgtgggctgacgccgattaccgtctgggtgtgcttcaggatctgatttcgccggctctgggcgcttctattggtcgcgctgtggatctgattgctttccatggtgttgatccggctacgggtaagcctgccacggctgtgaaggtgtcgctggataagacgtcgaagacggttgatgccacggattccgctacggctgatcttgttaaggctgtcggcctgattgctggggctggtttgcaggttcctaacggggtcgccctggatccggcgttctcgtttgctctgtctactgaggtgtatccgaaggggtctccgcttgccggtcagccgatgtatcctgccgccgggtttgccggtttggataattggcgtgggctgaatgttggtgcttcttcgactgtttcgggtgccccggagatgtcgcctgcctctggtgttaaggctattgttggtgatttctctcgtgtccattgggggttccagcgtaacttcccgatcgagctgatcgagtatggcgatccggatcagactggccgcgatcttaagggccataacgaggttatggttcgtgccgaggctgtcctgtatgtggctatcgagtctctggattcgtttgctatcgtgaaggagaaggctgcaccgaagcctaatcctccggccggtaactgatctatatgttgcgataatgttcatgctgtgtgcagggggtggtgttgatgggtatcattttgaagcctgaggatattgagcctttcgccgatattcctagagagaagcttgaggcgatgatcgccgatgtggaggctgtggctgtcagtgtcgccccctgtatcgctaaaccggatttcaaatataaggatgccgctaaggctattctgcgcagggctttgttgcgctggaatgatactggcgtgtcgggtcaggtacagtatgagtctgcgggtcctttcgctcagactacacggtctaatactcccacgaacttgttgtggccttccgagattgccgcgttgaagaagctgtgtgagggtgatggtggggctggtaaagcgttcactatcacacccactattaatggtcgatatgtacattctgaggtgtgttccacggtgtggggtgagggttgctcgtgcgggtctaatattaacggctacgctggccctttgtgggagatatgatatgaccagttttccttacggtgaaacggttgtgatgcttcagccgactgttcgtgtcgatgatcttggtgacaaggtggaagactggtctaagcctgtcgaaaccgtgttccataatgtggccatctatgcttccgtttcgcaggaggatgaggctgcggggcgtgactcggattatgagcattggtcgatgcttttcaagtcccctgttgtgggcgctgattatcgttgccggtggcgtattcggggtgttgtgtgggaggctgacgggtctcctatcgtgtggcgtcaccccatgtcaggttgggatgctggtacgcagatcaatgtgaagcgtaagaagggctgatagattgtggctcaggatgtgaatgtgaagctgaacttgccgggtattcgtgaggtgttgaagtctcctggtgtgcagggcatgttggctgagcgtggcgagcgggttaggcgtgccgcatcggcgaatgtgggcggtaatgcttacgatagggcccagtatcgtgccgggttatcatcggaggtgcaggttcaccgtgttgaggctgtggcgaggattggcaccacctataagggtggtaaaaggcttgaggcgaagcatggcacgttggcgaggtcgattggggctgcgtcgtgatcgtttacggtgatcctcgcgtgtgggctaaacgtgtgctcaaggatgatggctggctgtccgatataccttgtgtggggacggtgcctgaggatttcagcggcgacttgatttggttggcgttggatggtggcctgcagttgcatgtgcgtgagcgtgtttttttgcgggtgaatgtgttttctgatatgccggatcgtgctatgtcgctagccaggcgggttgaggctgtgctggctgatggtgtggacggtgacccggtggtgttttgtcggcgttctactggccctgatttgctggttgatggtgcacgttttgatgtgtattcgctttttgagctgatatgtaggcctgcggagtctgaataagcttattgtttttgttttaatgtaattgtttgatatttaatgggagttgtgatggctgcaacacgtaaagcgtctaatgttcgttcagcggttactggcgacgtgtatattggtgacgcgcacgcgggtgatagtattgatggtgtgaagacggttcctgacggtcttaccgctttagggtacctgtcggatgacgggtttaagattaagcctgagcgtaaaacggatgatttgaaggcttggcagaatgcggatgttgttcgcactgtggctaccgagtcttctatcgagatttctttccagctgatcgagtctaagaaggaggttatcgagctgttttggcagtcgaaggttactgccggagccgattcgggttcgttcgatatttctcctggtgccacgacgggtgttcacgccctgttgatggatattattgatggcgatcaggttattcgctactatttccctgaggttgagttgattgatcgtgacgagattaagggcaagaatggcgaggtgtatgggtatggtgtgacgttgaaggcgtatcctgcccacattaaccataagggtgatgcggtgtctggtcgggggtggatgacggctttaaaagctgatactcctccgactcctctttcggtcccgaatcctccgaagcctgagcctaatcc

SEQ ID NO: 79 - DNA, 19378 bp, Pahexavirus sp.
  source 1..19378: mol_type = genomic DNA
acacccttgacggaacaaatcaggctcacccgcatggccatgatgcaactcgtccacatgttcgaccactgcgccaacgtcaccatcacatccatcccaggcaaccacggtgaagcagtacgattcggtaaaggcgtcaccacctacgacgactccttcgatgtagactgctgccgcgccatcgcagaagcctaccagctcaacaaccaataccccaacctacacttttatttccccagccgagacgaaatgaccaccaccgtcgacgtggcaggcacacaaatcctgcacgcccacggacaccaatggcacaccggcaaacactatgattggtggcgcggacaagtattccacaacggcaccgtatcccacatcctcatggccgggcaccgacaccacctagaaatctccgaacaaggacaacgcaccttcatccaatgcccatccatggaaggagaatccgtctggtaccggcaccgcacaggcaccaccggccacccaggactcgtgtgctacactatcaacaacaaaacaccaaacaactaccagatagcgagatgaaatagtgccatgagcagacgaccaacaaaagcagacctggccaccaccgcatcgtgggtgtgggccacagaccatcatcttcgcacactcaaccgggcatgcaccaaagtagccacacactatcccgcaatcagtgcagacgacctgtaccaagactccctactatatattgcggtgcgggaacaataccacaacctagacagcaaacactacatcaaaatgtgctacagggtagccaaccggctagccaacaagacagtacaacacctagaccaaccgaaacctttatccgatattattcatctagccgacaaccaaaccagcaactaacaaaaaaggagaacacacaccatggttaaaaccatcctcgacgacggaacccaaaccaccatcctccaaaccgtaggcaccaccaccacagcaatcatcaccaacacagaaacacccgaaaccatcaccgccaaatacaccatctctaaagacggcacagccacctacagcatcagcggcaacacctacctcggcgaccaccaacacattatcaaactcatgtacgactactgccactgcgtaggacgattcgacaccaccaacaccagcaacccagacgacttcgacaacctgttcaaggggtgaccagtgaaccgaacctacaccaccgccgacatcatccaggcagcccaatggatctggaacggcggcccatggaaaccatcagtggaaccaggcatgccacccccaccaaccgcgccacaacatcacggcaacaacatcgtctccatgatcgatctacaactggccatcgacgactacaccctcacctgccagccatccaaacagcggaaacggctagctaggttggcagcgttccgtgaagtatacgggtatgaccaaacctattcggtggcagcccaacgattgggtgtgacaagacaaaccgtgaaacagtgggcagaccaaacactgatgacgttaaccgagtacgcaaacagcacatactacatgccagacgataacgaaggaatggcataacacgatggacaacacacacaatatcccctacaccgccctcaaaacagtagtacaccgaatcatccaacaacagcccaccaacatgaaccagctagaaaacattgttgacggtgtcgaaaaccagtaccgtataccaatctcactcgacaatgttaaccttactgttaaagaagtcagcctcgatgatctcacaatcgatcaagacacgctagacgagtgtggggaaatcctgtggtgctgcgacagtgcaggataccccaaccacaacaacacacagtaaccgcaccgcataaacaaaaagagtgccccagcagcagccaccacacaatcgtggcagcaccgctggggcacacacacatattcacttatgcaacagtagactctaccgtgccaacctccggctcggcggcacgcctcggcacatagccaccaagatcagcatcatccatcggctcgatcatgccaggatccgacacatcaaccatgtgcggctcaaccaagcccccatcatccggtggaaccaaacccgcatccacaggcgtggttttaggtttgccggccacaaacgctgggctaccaaacgatgtagcaaccgacaacaccgcagcaaccgtagctgtgatcaacgccgattcccacggcaaaccgcgaaacgactccgcagtatacgtgacacccgccgtcacccccaacacagcaacaaacgtttgcacaaaagtcttagccgcccgctccagtaaacctaaccaaaactgtttacccacaacaaaccaccatcactttttcaaaccgttaacagcagactcaagcctgtcaatacggctacgacactccaacacgtaataccagacactccacagggcatccttagtgcgccacagcttccccgtcaccggattcttcacccacgacaaggcatcaacacgcttacccaaatcaccattctgaacctgaaccacacccacatcatgatgcagcttattcaccgaaccactaagctgagcagacaattgtttaatctgattatgtaacgcttgtacatcagccaccgttaactcctcactctctccactgcctccgttgactacggccataaacctgtcccacggaaaccacggccccggatcgtcatgatccgactgatgccacgcatccgtcacatcagtatgcccgcacacaccccgcctacccgcttttagatcggccacagacagtttccttttcgggacaccatgcttgtcacacaactgccggcacaggatagcggcacgctccacagcgggccacacccgaggatcaagccactgctcacgagtgtaagcatgccccggcacacggaacgaggcgtgcgaacccccatccgcgcaaatctctatacccaaactatgcggattcggcggggcatgccaaccaatcgtagactccgacaggcactgcaccgtctccccaatatcacacacataatgcgccgaaccgcccgacgatggggacgcgaaatagttcgccgtagacaccgcccgacccttccgcgaggcggacggaaacccaacatccgggcatgtcgcatgaatcacaaccctattcaccggactattcgaaccgcttgagtgatgcgccgctggaataaacctcaccgcatgtcacccccaaacactacaatcaacatcagtaacacccttcccttgtcttgttcacctactggatgatacggtaaccacaggtgacggtttcacactctcacaggccaccgagcccgatatggtagaggccgtaccgtcactatatttcacaaccaggcggccaccggaacagtacacagacaccacagagcgcccatccttgccatccttaccattcgtgccatcggcaccggcagaaccctgcggaccctgaggcccaacagggccacgctcaccctgttcaccctgtgcaccggctgcaccagggggaccggcagggccacggccaccatcagccccatcagagccatccctaccaggcacaccatctttaccgtcagccccatcaacaccatcgacaccatccttgccgttagcgccgggcagcccgtcaggacccttcacaccattcaagccaggggaaccctgcggaccaacagagccaaccagcccagccgaaccattaacaccatcccggccgtcaacccctgcggggccttgcgggccgcgtacaccggcaggacccggcacaccctgcacgctacgctcaacacgctgagcatccacacacaagccagactggtgaagacgcaccgactcctgcccgcccgaggcacacgcctgccgcacacggctggctaaacctttagccgctatgccattagactcggccctagcctgctccgaatcccgctcagaagacaccgatccgaaacgcaaagcacccccagcaaccaccatcaacagtacaagcgacaggaacaacaacagcagggaagccttctcaaaattgcggcgctgccgcttctcttcctctaactccctcattcattcacccccccaacgtgtcagacagaaaaccgggcggatcaggcaacaccaaaggatcaacatcatcaggaagaccagcgttaaaccggcgaacctcacgccgcacaccccacgtatactcttccatcgcatccacctgagcagacagccggcgcaaacgccgcctagaccgggatgtgaccgcctgaacagaacccaaaaccgtggccaacgcggtacagatagaggccaccagtgcaggagtaaaccacgacaccacagccccccaacatcacaccatccgccacaacaacagcccggtcacacgccgacagcaatccagttagctatcgcaggcacaccagaaggcttagaaccatcattcgtgataaacgccaacccaaaatccttggtagtgatattgtaggccttcacatcaatctgtgtcgtgcccccagcagccgtgcccatagacgccaccacaacaggcgggctagcaaactggcgctcaaacgggatcgtgtaagcatacacattcgatcctccaaacgtgatagacttagtgccagtctcaatcctcggagacaggagcatccaatcacccgaatggttaccccacacagccccagaaggaaccatcacacggtcaccctccaccggggtcgggtcacacgcagcagactcgccaaacgccacacgggccgccacagccctcctgtcaagctgctgctgcaacccgtcagacgacaacaccaaagtagccaacaactgctgatgatacacgccaggctcggcacgcaacacgtcacgggcacgctccgaagacccgccaggaacaatctccaacttggccgtgttctcctgccaatcccgcgacaggacaacatagtcgtaccttggcttccccgggcccggaagcggctctgttatcgtctcaacattattcgacgtacacatcaccccgtgagcccaagcctgccccggcaggatctcacacaacactgtggcaccctgaacagtagtgcccacacgaaaatcatccggccctttaacagacggcatattacccatcagaccagacatttgagcccaatcatactcggtcaacacaccatcaaaccctttacacacaatacccacaacaaacccccaattttgttttaaaatttttgcaaatcccgcacacccgcagccaaaccagccacacgccgcgccaacaacgccgacggattatcctcataatcccccgcaacaggagtcaccttcgtccacccgtcaccaggcgatacacactccacatcaatctgccgcacaatctccgcaatagggcccgaacccacatccacatagataagatcaccgggcatcaacctgccgggcccaaaccgcaacaccttcgactcggccaactcgatcttaaaccccgacgtagccccagactcggccagcaccagctcagcctcatcggcaagaaacgcatcctcatccgtgttacgggcatccttaaacacctctacacgatcaaaccactccccctcagacaagctatccacatcctcacaaaacagccgatccttaccctcgccgcggccacccacaaccacagatgtcgccttaggggcgtcacgcacatactcccacgacacaatagacccagactcggcagtcaatacatggctacgggtcacagcaggcacacaatcaaacagcaaaccccgctgatcaaacttcgcattctcaaactggttcaccgtgacagtcatccgagcccacgacaacaccggcaacaacttatcggcaaacaagtggaaccgcacctgaaaatccttaatatagcgtccacgacgctcatcatcggtcataaacaaaccaggcggaaaacgccaagcattatcccccaacacctgcttagccaccgactccgccgcaccagaatagtgggcataatccctgtcggcacgccactccataccaaccaaaccaggacgataattcacaggccacatcagcttacgccacaacaggcgaatatcatcctcacacgtgatagtcacccgcgaagaacgccaaggacccacaccgtgcacccgacgcacaggcccagaaaaaatctggccaccaccataatcaacaaccagccgtgcacccggcctcgtcaaaccgtcaagcctggaatgatcacccgacaccaccaactccagcgtcgacaaaccattccacttcaacgacaacttcaacgactcaaaaaaattgataggcgccacacggcgataatccggcgtaaacaatgttacatgcggaacaagaccagccatcaactattcaccaagccctcaaaaacctgtactgcaccgacacaacaatggcacccaaaccaaccatctcaatattcacactccgagaaccgccaggcgggataggggcaaactcccactccgtcaaacgatccatcacatcctcaaacccattcaacaatgcagactgtttacgaggatccgtatcaatagtgatccaatcaaactcctcgacaggatagtccgaagacacacgcaaaccatcaatctgcacagaccacgactgcaaaggaccctcaacacgaatcacaggccacgcaggcacatcacccttattagacagattatcccaacccgaaccaacacccggcgtcaacacaaccggaaaagccgtgccacccttgccaacagggccgccacccaaccaatcctgcaacttagcgttactgaaacgaaacctttgctcatccccataccaaaacgggtcataggctgtcaaatgaagcacataacgcgcatagccgcgattcaccggatccacagtaaacgtgtcatcagccgaatcaaaacgacacttcaacacccgctccacaccagatggggtcttaaccgacagttcaccctcctcgccaggaggaaacgcagaccacaacgcgtcataggctttcaaaaaaccgtcacgaaacccgcccggcggatcctcggcaacacccgacaccaacaccggtaatatcacctcgcgaggcttcacatgaaacccacgccactccgagccgtgcaccccaacatgggtttgagaaaaatgctccacctcaggaacacccaaaccgcgcaacgaatcattcaacaacatgaccggggacgcacccgtataatccgtcaaatgaagcacacgctcctcaccgtacagcggatccataaaccaggtaacagtcaaaccagaacgatcagacgggtcaggaataaacatgaacaacacccccctatcacatgtaagccaacgcattcaaagcgtcacgctgctgccgctcaatccgcttcgcaaactcgttcggatccccatacgtgggtccgtccacattcaccacaacactcttatcattcatacgctgatacctgccatacggggtaaacgagcctaccgaagatcgcacaccaaaccgggcatcaacagcatccggaagccgaccagccacacccgacatcgcatccaaagccaaaccagcattcccggtgatcccctcagccaaaccggcaacaacctgccggccaacctggtcacgaaacaccctcgacggggaatgaatacccaacaccgacttcgccgcattagcaacctgagaacccatattacgcaccgtatccaacaggccactcatagcattccggataccattacccaaacccgacaccacatcgcggccagcagacaccaacaaggaccccatgttaccgagagcacgcctaatattgccaggaagattccggaaaaaacccagtacaccatgcacaccgctagacacagcagaccccatagcatgcatagcagaagatgccgcactccgggcaccattaaacccgcgcacagcaccattccgaaccctagacgccatcgaactgaaaaacccgccaacagcagacgccaccgaagacacaacaccccggatagcattcatcgcagaagaaactgcaccacgggccgcgttaatcccggacctcacatgagaagccaccgacaaaccaagccgcgcaaaaaaccccacaaccgcgttcacaccggcagaaataaccgacttgaaaccgttaataaacgctgacgtaaacgctctaatatgattccagccattcaagatggcagtgcccatagacctcacgccagacactaaatgattcacaacccatgaaatgacacgggtgacagtcccaataatccgggctgcagcagacacaatagcgccaagaatacgtgcaacaaacccgatcacagctgtcacaatcggcatcacaaccggaataatacgggccaccacctgtatcacaaccgcaacaacctgaaccaccacacgcataatcgacatgatgactggtatcaacgaccggataaggccgatgataggtggcagcacagacatgaccgcacccaaaatttgttgaatcacaggcatcaaaacaggcaccaactgcatcacaacaccaacaacctgccgtatcacagcaacaacagcctgaataaccggcatcaacgtaggcagcaacatggccgcaacctgcgtcaccataccaataatctgcgtgatcacaggaacaagacgggccaccaacataccaatcacaggcatcaactgggcagccaacccggcaaccaaaccaataatctggccaaaaacgggagccaaccgtgccaccaaaccagcaacaatcccgaacagcggctgcacagcagccatgatctgccccaaagcctggccaaccacagccacaagctgcataacagcggcgcgaaactgggcgttagtggcaaacatggccgcaaacaagccgatcacaataccgacagggcctcccagggcacgaaacacgccgccaagccccccggcggcacccttcaacgcaccaaacgacggcagtagattcttcaacgacaccgccaacggggcaaaccctgcaacaagcttccccaccccggcagccacaataccgaacactgcggtgccgccagcaaacatggcacccaaattcactttagggacaggcaaatgcattctcgcaaaaatgcccttcagctgctccaccttggcgcgcatctgtgcattcattctcgtgatcatgcccggcatacggttaatccacgccaaaatagacggcatcacccgctgaatcccctgatccaccgacgcaaacatcggcttcacagaatccgtaacagacttaataaccggattcaacgcaacaaaaatctgccgcaacccgttaagaaacggcgccatagccgtggcaccaagataacccagggcgcccttaacattcttcatagcgccctcaaacgtctgaccagacgcctgcgcagcaccacccatgccaagcttcatcgcagccgcaaacgtgttaaaatcaatctgccccttcgacaccatctgcgacacctcagcagacgttttaccagtctgcctggcaagcaaagacagcacaggaacacccgccatcgtaagctgcaacatgtcatcgccctgcaacttaccgcgagccatcacagacgtaaaaatagcgcccgtatcctgaaacgacttacccgaaatataagacacatcggcgacagtcttcaacacatccgtcatctgcccgccagacttcacacccgaagcagacaacgccgccgcagtagacgccgcatcccccaacgcatacgacgtaccagtcacagcctcaatagccgaattcataatcgaagacgtgtcagaagacgtgtgacccaaaccagtcaacttagcctgagcctcatcgatagccatagccctagctataccgccaccgatagtcacatcatagatagacttcaaaccctttttggcaacattgatggcacccatcattgcggcgccacccaaagccaacttcatcccgctagcaaaaagactacccgaacgctgaccctcagcaggcatcaccccggaaagctgtttaccaacatccgccttcaaaccaggcatcttcgtatacaacgacacatatgcggaagcaatctcaccagacatacactattcaccccataatattaatctcgcgagacaccccgccaccggcacgaacacgcgccaaaatatcgtccacctgtccagacgtaaaccgggccctacgctcatccgtaggcctcgccacaggctccggctgcccctcactattagcagacctataatgatccagcatgtccagtacagcccactcgcaccactcaaacgggcgctgccaaccattcaggtgggccgccaactggctcgacgtatcggtacacaacacgccagccagccggacagcctcaccccaacacatctgcgggccaccaacactataaacagaaacaccaaatttagtgcggaaatcgtattcgatggccccacgataatcatcaatcaggccgtggagccaaactactcccccagcgaggcacccttaccgtcaggcttatattccatccactcacggaaaatctcggcaacacgaaccataggaagcccctccaaagcctccacagcatcctctggggcggcagcctccaacatagaaaacatcacctcaacctgggcgaaatcagcagactcccccgactgggcaatcctggcggcacggcgaaaaacgcgggcaggaacagcctgagccgtctcctccgcatccgccaacacccagctacggtcaccaatcttcaacgtgtaacctgtatcactcatctatcaacaatccctcaaactatgtgtatcagttattagacggcggattaggagacggctcaggcttcggaggaaccgggggagtatcagcttttaaagccgtcatccacccccgaccagacaccgcattaccagtcttattaatctgggcaggatacgccttcaacgtcacaccatacccatacacctcgccattcttacccttaatctcgtcacgatcgacaagctcaacctcagggaaatagtagcgaataacctgatcaccatcaacaatatccatcagtaaagcgtgcacgccagtggtggcaccaggagaaatatcgaacgaacccgaatcggctccggcagtaaccttcgactgccaaaacagttcgataacctccttcttagactcgatcagctggaaagaaatctcgttagaagactccgtggccacagtgcgaacaacatccgcattctgccaagccttcaaatcatccgttttacgctcaggcttaatcttaaacccgtcatccgacagataccctaaagcggtaagaccgtcaggaaccgtcttcacaccatcaatagcgtcaccggcgtgagctttaccaatatagacgtcacccgtaacagcagagcgaacattagacgctttacatgttgcagccatcacaacccccattaaatatcaaacaattacattaaaacaaaaacaataagcttattcagactccgcaggccgacatatcagctcaaaaagcgaatacacatcaaaacgtgcaccatcaaccagcaaatcagggccagtagaccgtttacagtacaccacagggtctccatcaacaccatcagccagcacaacctcaacacgacgcgccaacgacatagcacgatccggcatatcagaaaacacgttcacccgcaaaaacacctgctcgcgcacatgcaactgcgggccaccatccaacgccaaccaaatcaagtcaccctcaaaccggtcaggcaccgtccccacacagggtatcccagacagccagccatcatccgccaacacacgtttagcccacttcctggggttaccgtaaacgatcacgacttagccccaatcgaacgagccaacgtgccatgcttcgcctcaatacgcttcccacccttataagtggtaccaatcctggcgacagcctcaacacggtgaacctgcacctccgatgataacccggcacgatactgggccctatcgtaagcattaccgcccacattcgccgatgcggcacgcctaacccgctcgccacgctcagccaacatgccctgcacaccaggagacttcaacacctcacgaatacccgacaagttcagcttcacattcacatcctgagccacaaccgatcagcccttcttacgcttcacattgatctgcgtgcccgcatcccagccagacatcggatgatgccacacgataggagacccgtcagcctcccacaccacaccccgaatacgccaccggcaacgataatcagcgcccacaacaggggacttgaaaagcatcgaccaatgctcataatccgagtcacggcctgccgcctcatcctcctgcgacaacgaagaatagatggccacattatggtacacggtttctacaggatgcccccaatcctcaaccttgtcaccaagatcatcgacacgaacagtcggctgaagcatcacaaccatttcaccgtaaggaaaactggtcatatcatatctcccacaaagggccagcgtagccgttaatattcgacccgcacgagcaaccctcaccccacaccgtggaacacacctcagaatgattcacactactcctcatggtcggtgtaatagtgaacgctttaccagccccaccatcaccctcacacaacttcttcaacgcggcaatcccggaaggccacaacaaattcgtgggagtattagaccgtgtagtctgggcgaaagggcccgcagactcatactgcacctgaccagaaacaccagtatcattccagcgcaataaagccctgcgcagtatcgccttagccgcatccttgtatttgaaatccggtttagcgatacagggggcgacactgacagccacagcctccacatcggcgatcatcgcctcaagcttatctttaggaatatcggcgaaaggctcaatatcctcaggcttcaaaatgatacccatcaacaccaccccctgcacatatacatatcaccgctacaataaatcagttaccggccggcggattaggcttcggggcagccttctccttcacaacagcaaacgaatcaagcgactcgatagccacatacagcacagcctcggcacgaaccataacctcattatggcccttcagatcacgcccagtctgatcctgatcgccatactcgatcagctcgatcgggaagttacgctggaacccccaatgaacacgagagaaatcaccaacaatagccttaacaccagaggcaggcgacatctccggggcacccgaaacagtcgaagaagcaccaacattcagcccacgccaattatccaaaccggcaaacccggcggcaggatacatcggctgaccagcaagcggagaccccttcggatacacctcagtagacagggcaaacgagaacgccggatccaaagcaacaccgttaggaacctgcaaaccagcaccagcgataagaccgacagccttcacaagatcagtcgtggcagaatccgtggcatcaacaacattcttcgtcttatccagcgacacctggacagcagcggcaggcttacccgtagcaggatcaataccatggaaagcaatcagatcaaccgcgcgaccaatcgaggcacccagggccggggaaatcagatcctgaagcacacccagacggtaatcggcgtcagcccacataaactcgtccgagacacgctgctgagtcacaaccttgataggctgagcagtaaacgccgaaacatccaccgatgcggaaggcttaacctcgccctcaccaacaatcttagcgcgaggaacaccactaaacacggcacccttcacagggccgaaaatagtcggctgctccggcgacagtttagccaaaacaccagaatcgatagcacggtcacgaaccgcaccaatcatagaaccaggaagctcaagcttccctgcagaaagaaaatcgtcagccatcaaaaatcatctcctagaattattgacaagagcatccacaaacgcgacaccctcacgtcgtttaacatcatcaacgggggcactccccgcaagacggcgcacacccgcgccactaccactctggtcgatcaaacccttcaaagccttagcagactccaccagtgcttcacgatcgtcgccgtgcaagaaagcgaccgcatcacccgacaagccacactctgaagccacctcgcgcttcacaccctcaagaacaaacccgttgatcctgtcttcgagttcctcattcttgcggcgaagctcatcaatagtagatccagaatcgtcactcgatgtacgaagcttctccaactcggcaaaattacttttagcacgagactcccacttacgggcctcagccttccaatccgtgccagacggcttatctacaccatcatgcttcgactgatcgcctgcctgcccgctttgatcatccttcacaacatcaacaatgtctccaccctttccgggcccaacaacatcattgtcgacattctgttcctcaacactctgatcggccatagcctaaccttacactccttgcggaaaacaataccattattgccgccccccgtgcgggagacaaccctgtgcaccgataaccggcggcgcacaaccggaaaccatcatctcatgtcgccaacagtacgcatagccttcaaaatattgccaggcgactgctgcaacccatgatcatcaacccattcacgagccttctcatacgtcctctgatactcggcatcagccctatttggttcccaagggccaacaacctcaaccaccgtacaaccacaatgatcatgatacttcgaaccaaacggacgcttaccaccacgcttatgacgccgcgtatgaccggaagtaagtgccctttccttagtcgtataatccgacctcgtagccaacatggcacaaaaagcacacggatcaccatccgtcaccctgcgccacgacctaccctgcccacccgcagaccactcaaccgtgtcacggccagcattcatgacagccctattaacacccgccgccatagcatcaatagtatcattcgccctatccgggtcactattcataatcttcatagtcgaaaacgacctcgccaaagccgccgcagcatcaaactcgtcatacacaatcaaaccaggatccacaccgttaagcttccgaaaatccgacacgaatttggctgccagcgacgccgaaccatcatggccggcacgctccaactccacacacaaacgcacatactgcgtgtcactcatcctgccagcacgccacaaacggccaagctcggcataatagcccgcatacttcccagcaaacctgaccgcctcacgctgatacccggtagcagccaacctcgacacagcacccgaagccatcgcctatcaaacctcgctagtttgacgcgatatagccccagccagcgccgccaacggatccgcagactcagcacgatgacgcatcacagcctcaacctgcacatcatcaagccccaacatctccaacaccgtacgagaatccgcaggcaaaataccggcaccaacaagcttcgtcacagcatccgccgtagcagcccgagtcggggttgaagcatcacgccacctcaaacccacatcaccgaaaaacgcggcctcatcaacactcgaatcaagcgccttagcagccaggaaaccaaccgacaggcaaccctgaccaaacgacgtctgacgccgctcagcacgcttcacaagcctcgactcctcggcagccaacgcctcaccactaggtgggttagacgtgataaacccgaaatagcgttcaggcacctcagcctccccagccgtcaactgcgccaacagccgcatctgatccgaatacggtgtaggagaattcacaggaaacgacccaacattcggggtatcaccgtcatcatccttatccacagcccacacagaagccatcgacaggacccagccaggctgcgaatactcatccgcgctcacacccgtaacccaacgttgaggatacgcataaaaatcacgattcacagactgccccaacagtgtgcgcacagcctcatccgtgtaagccctaatcgaccgagtgatctccgaacgcccatcaatacgcgacgtcctacgccgattcacaatcggcaccaacggaaccgccccaagcacattcggtatacggcccgtctcaacccactcacgagacccacgccgctcaacctgaacaatcacatcaggaagcaacaactccgcctcaacaacctcagaatcacacgtctgctgcaccaccaaacccgcatccagacgagacccgtccgccgaaaaccggccagtacaattctttggtgactgcggacgaaccaacgccgacccatcaccctgggggataacagccacaaacgacaacccaaaaatcagcgcatccaaatgcacatcacacgacgccgtagcaagccgattcgcagcatacacaccatccaggccgtagccgtcaccattcgtccaaccaagccaatccagacgctcctccaaagcatccaccgcaataccaggccacgacaccaccgtctgcacacgctgcaactccggcggaatagcaacccccaaatcacgcacccgggcagaaccctcatagtagccctcaatacgacaatgccacgaagacaacctttgaatacgatcgtacatgccctcaatcagagccaactcgtccacgttcttaccacagacacccgcttcctaccagaccgttcacgccgcctagccttcgccatcttcaccccaagatacgccaaagacacagcctccaaaggaacctcagaaccatccttaaacgaggaaccccaaccccacgcagaccccttacgcttctgcacagccgacctcacagcaatatccaacatgtcacggcgagaatcagcacgaggatgagaaacaacacccgaacgaacaccctcaagaaacgcctgacacgcctccacataggtgccagtatcagcaaccaccacgccacggcccggaacaccacgatcacttaaagccttttgcaaaagcacagcacccgaaccggcaaccatgatcttttccgtgtcaccccaacgcaacgccagccagtcagccagctggcccacaccatcaacgatcgttcccgacagcccatcaataacctcaacatgaaccccagcatcagtccggccggcacccgccaaagcaacccgatccccagaacgagaaaacgagacaccaaacactttcccgccaaccagactcgcctcatccacagcagactgagcccacttatccgccggtatcaccgacgtagcagactggccacgatcccaccagccaagccgctcccgagcaaacccggcagcagacatcgactcatgctcatcgcttacggtcccaaaattcagacgccgccccaacgccggattcgtctcccccgccaacttccgccactgccgcgacacatcatccggatcagactcgtcaggaatcgaaaactccgtccacgcaaaccttttaccacccgacaaagcctgcccacgaagacgcaacaccacagaaccatccgccaacggccccggcggcgtacccaaaaaaatctgctgcggatcaccagacggggcagcgctcaccgtaggaagcaaagcctccaactgctcatccgacaactcctgagcctcatcacacaccaaatcatcaaccgtaaacccgcgagcagaaccccggctacgggccacaaactcaaccgaaccccaacccggacaaccacacttacgctcaaacgtggcacaatccggatgatgcaacacaatagcctcctgaccattcgtcgcacgaatcgtcttcaccatacgatacaagtcaggaaactgccgctcattctcaaaaaacgacctcaaccgcataaacgccttacgagccgacttcaactcgtgagcagtatgcaaaatacgacgaccctgaatagtcgccttaaacaactccacaacctccaaaatagcattcttgccattctggcgaggcacaaacaccccacacacacccgaagcaagcctgccattgctaccgacagccagccaatcatccaacacctgctgctgccatggatcaggcatcaacccatacgcacgaccgaactccccagcatcaccgccagcagacaccgaatacgccgcagcaacacgatgacgcggaacctgagaacccaccaccggagacatcaagcacccctacgcttcctataccggtcaatcatcgccaccgcagaacccccaccacggccaccagacgccacatcaaccgaataccgatccaacatacccataaaagccttcacatgggcacgaagcgaagccaccaaatccgcgcgaccctcacgccacacacaatcatgaatcaccgcagcatccataagaaacaaccactcctcatcagacacatactgcgcgcgactatcctcaccccacacacgccaccaacgacgcgtctccccacaccactcacgactatcaggaagctcaggctgcacaacactcaccaccaacacaaaaagtcgacaaacagacaaaaccacaaaagggaggtatttcactaagccgtacgaggtcttgcacgggtgtgcagggggtgtccccggtgggggttggcgggtttttcaccatggaatcaatgtttttgtggtttgttgttggaatttgatgtttggttcgctgcgattgcctttgcttctgttgcatgttctgcagatgatttgcccgttgtcgtgggtgttgagtcctcccctgctgacgggtgtgatgtggtcggcttcggggcttgttggtagctggtgtgtgttccaggtgatggttgctccgcagagtgggcaggtggtttggccttgctgttgggcttgggtgatgagtcttgcccgccagcgccggtgtgaggcggatgcggtgcggttggtgtgtgccatcatgtcccctgatctcctatggcccctgtgagcctctcatggctcctgtaacggcctgggaaccgttgggggtatgtttaccttgcccttgccctgctgttcgattctgggggctgttttgttcgtttgagggggtgtcttgaacttgctggggtggttgtttttctccactaccccccatgggtgtgaaaaagatcacatcgccccccagctgtgtcaaaaagagaaggacacggaagaaaaaaggggggtgggtgttcgcgtttcacagcttaccgcttggcgcctagcgttgaaggaacacgggctcagcgggaacacctgacaggtttttaaagtcttctacatataatatgtactttaagtcttacccggtgttaagggtgttggcgtga

SEQ ID NO: 80 - DNA, 10978 bp, Pahexavirus sp.
  source 1..10978: mol_type = genomic DNA
gcccagtatcgtggagggttgtcgtgtgaggtgcaggttcaccgtgtggaggctgtggcccgtattggcaccacctataggggtgggaagcgtattgaggcgaagcatggcacgttggctcgttcgattggggctgcgtcgtgatcgtctacgatgaccccaggaagtgggctaaacgtgtgttggcggatgatggatggctgtccgatataccgtgtactgggacggtgcctgacgatttcggcggtgatctgatttggttggcgttggatggtggcccgcagttgcatgttcgtgagcgtgtttttttgcgggtgaatgtgttttctgatatgccggatcgtgctatgtcgttggcgcgtcgtgttgaggctgtgctggctgatggtgtggacggtgaccctgtggtgtactgtaaacggtctactggccctgatttgctggttgatggtgcacgttttgatgtgtattcgctgtttgagctgatatgcaggcctgtcgaatccgggtaaacgttttgtttgatattgttgtttgttttttgtttgatattgtttttgggggttatgatggctgcaacacgtaaagcgtctaatgttcgctctgctgttacgagtgacgtctatattggtaaagctcatgccggtgacactattgatggtgtgaagacggttcctgacggtcttaccgctttagggtatctgtctgatgacgggtttaagattaagcctgagcgtaaaacggatgatttgaaggcttggcagaatgcggatgttgttcgcactgtggccaccgagtcttctatcgagatttcttttcagctgatcgagtctaagaaggaggttatcgaactgttttggcagtcgaatgttactgccggagccgattcgggttcgttcgatatttctccgggtgccacgacgggtgttcatgccctgttgatggatattgtggatggcgatcaggttattcgctactatttccctgaggttgagcttgtcgatcgtgacgagattaagggtaagaatggcgaggtgtacgggtatggtgtgacgttgaaggcgtatcctgcccagattaataagaagggtgatgcggtgtctggtcgggggtggatgacggctttaaaagctgatactccaccggttcctccttctccgaagccggagcctcctaagccgcctaagcctgagccggatccgaatccgccgtctaataactgatacacatagtttgagggattgttgatagatgagtgacacaggttacacgttgaagattagtgaccgtagctgggtgttgggtgatgcggcgtctacggctgcggcgttgtctgcttcgggtgtgaagtctggcgggcagatgacggatgtgttgaagactatcgcggatgtgtcttatatttcgggtaagtcgtttcaggatacgggcgctatttttacgtcggttatggctcgcggtaagttgcagggcgatgacatgttgcagcttacgatggcgggtgttcctgtactgtctttgcttgccaggcagacgggtaaaacctcggctgaggtgtcgcagatggtgtcgaaggggcagattgattttgccacgtttgcggctgcgatgaagcttggcatgggtggtgctgcgcaggcgtctggtaagacgtttgagggcgctatgaagaatgttaagggtgccctgggttatcttggtgctacggctatggccccgtttttgaacggcctgcggcagatttttgttgcgttgaatccggttattaagtctatcacggagtctgtgaagcccctgtttgcgtcggtggatcaggggattcagcggatgatgccgtctattttggcgtggattaaccgtatgccggctatgatcacaagaatgaatgcacagatgcgcgcgaaggttgagcagttgaagggcatttttgcgaggttgcatttgcctgtccctaaagtgaatttgggtgccatgtttgcgggtggcacagcggtgttcggtattgttgctgcgggtgtggggaagcttgttgcagggtttgccccgttggcggttgcgttgaagaatttgttgccgtcgtttggtgctttgaggggtgccgctggtgggcttggcggggtgtttcgcgccctgggtggccctgttggtattgtgatcggcttgtttgctgccatgtttgctacgaacgcccagtttcgtgcctctgttatgcagcttgtgggtgttgtcggtcaagccttgggtcagattatggtcgctattcagcccctgtttggtttggtggctggtgttggggctcagttggcgccggtgttcggtcagattattggtttggttgctggtttggctgcccagattgttcctttgattagtatgcttgtcgcccggctggttcctgtgattacacagattattggtgctgtgacgcaggttgcggccatgctgctgcccgcgcttatgccggtattgcaggctgttatggctgtgatacggcaggttattggtgtgataatgcagttggtgccggttttgatgccggtgattcaacagattttgggtgcggtcatgtctgttctgccgcctatcatcggcctgatccggtcgctgataccagtcatcatgtcgattatgcgtgtagtggtgcaggttgtttcggttgtgctgcaggtggtggcccgcattattccggttgtgatgccgattgtgacagctgtgatcgggtttgttgcacgtattcttggcgctattgtgtctgctgcagcccggattattgggactgtcacccgtgtcatttcatgggttgcgaatcatttagtgtctggcgtgaggtctatgggcacggccatcttgaatggctggaatcatattagagcgtttacgtctgcgtttattaacggtttcaagtcggtgatttctggcggcgtgaacgcggttgtggggttttttgcccggctgggttcttcggttgcctcccatgtgaggtctggttttaacgcggctcgtggcgctgtttcttctgcgatgaatgctatccgtagtgttgtgtcttcggtggcgtctgctgttggcgggtttttcgggtcgatggcgtctagggttcgtggtgctgcctcgtccgggtttaacgctgcgaggggtgcggcttctagtgctatgcatgctatgggttcggctgtgtctagtggtgtgcatggtgtgctgggttttttccggaatctgcccggtaatattcggcgtgcgcttggtaatatggggtccctgttggcgtctgctggccgtgatgtggtgtctggtttgggtaatggtatccggaatgctatgagtggcctgttggatacggtgcgtaatatgggttctcaggttgcgaatgcggcgaagtctgtgttgggtattcattccccgtctcgggtgtttcgtgatcaggttggccgtcaggttgttgccggtttggctgaggggatcaccggtaatgctggtttggcgttggatgcgatgtcgggtgttgcttcgcagcttccggatgctgttgatgcccggtttggtgtgcgatcgtctgtgggctcgtttaccccgtacgaccggtatcggcgtgctcagggtgagagtgttgtggtgaatgtgaatggcccgacgtatggtgatcctgccgagtttgcgaagcggattgagcggcagcagcgtgacgctttgaacgcgttggcttacatgtgagtaaaggggtatgcatgtttattcctgacccgtctgatcgttctggtttgactgtgacatggtcgatggatccgcggtttggcgatgagcgtgtgcttcatttgacggattatacggggtcgtctcctgtcatgttgttgaatgattcgttgcgcggcttgggtgtgcctgaggtggagcagttttctcaaactcatgttggggtgcacggttcggagtggcgcgggtttaatgtgaagcctcgggaggtgacgctgccggtgttggtgtcgggtgttgacccggatccggatggcgggtttcgtgacggttttttgaaggcgtatgacgagttgtggtctgcgtttcccccgggcgaggtaggggagttgtcggtgaagacccctgccggccgtgagcgtgtgctgaaatgccggtttgattcggctgatgacacgtttacggtggatccggtgaaccgcggttatgcgcgttatctgttgcatttgacggcttatgacccgttttggtatggggatgagcagaggtttcgtttcagtaacgcgaagttgcaggattggttgggtggcggccctgttaataagaagggtacagcgtttccggtggtgttgacgcctggtattggttcgggttgggataacctgtctaataggggtgatgtgcctgcgtggcctgtgattcgtgttgaggggcctttggagtcgtggtctgtgcagattgatggtttgcgtgtgtcttcggattatcccgtcgaggagtatgattggatcactattgatacggatcctcgccagcagtcggcgttgttgaacgggtttgaggatgagatggatcgtttgacagagtgggagtttgcgcctatcctgcctggcggttcgaagagtgtgaatattgagatggttggtttgggtgccattgttgtgtcggtgcagtacaggtttttgagggcttggtgaatggttgatggctggtcttgttccgcatgtaacattgtttacgccggattatcgtcgtgtggcgcctatcaattttgttgagtcgttgaagttgtcgttgaagtggaatggtttgtctacgctggagttggtggtgtctggggatcattcaaggcttgacgggttgactaggccgggtgctcggctggttgttgattatggtggtggccagattttttctgggcctgtgcgtcgggttcatggtgtgggcccttggcgttcttcgcgggtgactatcacgtgtgaggatgatattcgcctgttgtggcgtatgctgatggggcctgtgaattatcgtcctggtttggttggtatggagtggcgtgccgacagggattatgcccactattctggtgcggcggagtcggtggctaagcaggtgttgcgggataatgcttggcgttttccgcctggtttgtttatgaacgatgatgagagtcgtggccgctatattaaggattttcaggcgcggtttcacgtgtttgccgataagttgttgccggtgttgtcgtgggctcggatgactgtcacggtgaaacagtttgagaatgtgaagcaggatcagcgtggtttactgtttgattgtgtgcctgctgtgacgcgtgagcatgtgttgactgccgagtctgggtctattgtgtcgtgggagtatgtgcgtgacgccccgaaggctacggcggtggttgtgggtggccgcggcgaaggcaaagatcggctgttttgtgaggattttgacgcgttggccgaggatgagtggtttgatcgtgtcgaggtgtttaaggatgcccgtaacacggattctgagcatgtgcatctcattgatgaggcggagcgggtgttgtccgagtcgggggccacgtcggggtttaagatcgagttggctgagtcggatgtgttgcggtttgggccaggcaatctgatgccgggtgatttgatctatgtggatgtgggttctggcccgattgcggagattgtgcggcagattgatgtggagtgtgtatcgcctggtgatggttggacgaaggtgacacctgttgctggggattatgaggataatccgtcggcgttgctagcacggcgtgtggctggtttggctgcgggtgtgcgggatttgcaaaaattctagaaaagaattgggggtttgttgtgggtattgtgtgcaagggttttgatggtgtgttgaccgagtatgattgggctcaaatgtctggtctgatgggtaatatgccgtctgtgaagggcccggacgattttcgtgtcggcactactgttcagggtgccacagtgttgtgtgaggttttgccggggcaggcttgggctcacggggtgatgtgcacgtcgaatagtgttgagacggtgacagggcagctgcctggccctggcgagacccgttatgactatgtagtcctgtctagggattgggaggcgaatacggcgaagttggagattgttcctgggggccgtgcggagcgtgccagggatgtgttgcgtgccgagcctggcgtgtatcatcagcaacttttggcgacactggtgttgtcgtctaacgggttgcagcagcagttggataggcgggctattgcggcccgtgtggcttttggggagtcggcagcctgtgaccctacccctgtggagggtgatcgtgtgatggttccttctggggctgtgtgggctatccatgccggggattggatgctgttgtctccgaggattgagacgggttctaagtcgatcatgtttggcgggtctgctgtgtatgcttacacgatcccgttcgagcgccagttcagtaatcctcctgttgtggtggcgtctatgggtacggctgctgggggtactacccagattgatgtgaaggcctacaatataactagcaaggattttagtttagcgtttattacgaatgatggttctaagccgaatggtgtgcctgcgatagctaactggattgctgtcggcgtgtaatgtacggcttgcgggtatgagacgtgttgtggtggttgtagtggtagggggctgtagtgtcatggtttacacccacgctcgtggcctctctttgtaccgctatcgctactgttcttggttcgattcaggcggctacgtacaggtcgaagaagaggcttaggcagttgtctgcgcaggttgatgcgatggaagagtacacgtggaatattcgccatattgttcaccgctataacgcgaatctgccggagaacgttgagccggtaaagatgcctgatttgcccgagtttttgaaggatactgttgatggtggtggggggtgaattgtgagggagttggaggaagagaagcggcagcgccgctcgtttgagaaggcttcactggtgttgttgtttttgtcgcttgtgctgttggcggtggttgctgggggtgctttgcggtatggttctgtggcttcccaaagggattcggagcaggctaaagcccagtctaatggtacagctgccaagggtttggctgcccgtgtgcggcaggtgtgtgcttctggcgggcaggagtctgtgcggcttcaccagtctggtttgtgtgtggatgctcagcgtgttgagcgtagcgtgcagggtgtgccgggtcctgctggtgagcgcggcccgcaagggcccgctggtgttgatggccgtaatggtgttgatggttcggctgggctggttggccctgttggcccgcagggttccccgggtttgaatggtgtgaagggtcctgacgggctgcccggcgctaacggttcggatggccgtgatggtgtttcgggccgtgcaggtgctgatggtgtgaacggagttgacggcgctgatggtcgtgatggttcggctggtgagcccggtgatgtggggccttctggtcctgccggcccgcaaggtgcacagggggagcgtggtgagcgtggccccgcaggtgtgaacggatccgatggtaaagacggtaaggatggcgctgatgggcgctctgtggtgtctgtgtactgttccgggggccgcctggttgtgaaatatagtgacggtacggcctctaccatatcgggttctgcagcctgcgagagtgtgaaaccatcacctgtggttaccgtatcatcccataggtgaacaagaagagggaagggtgttactagtgttggtcgtgtttggtggtggtgtgtggtgagatacattccagcggcgcaccattcggccggttcgaatagtccggtgaatagggttgtgattcacgcgacatgcccggatgtggggtttccgtccgcttcgcgtaagggtagggcggtgtctacagcaaactattttgcttccccatcgtcgggtggttctgcccattatgtgtgtgatgttggggagacggtgcagtgcttgtcggagtctacgattgggtggcatgccccgcctaacccgcattctttgggtatagagatttgcgcggatgggggttcgcacgcctcgttccgggtgccagggcatgcttacactcgtgagcagtggcttgatcctcgtgtgtggcctgcggtggagcgtgccgctatcctgtgtcggcagttgtgtgacaagcatggtgtcccgaaaaggaagcttagcgtatccgatttgaaggctggcaagaggggtgtgtgcgggcacactgatgtgacggatgcgtggcatcagtcggatcatgacgatccggggccatggcttccgtgggacaggtttatggccgtcgtctgcggcggcagtggagagagtggagagttgagtatggctgatatacaagtgttacatgatcagattaaacagttgtcggcacaggtggcccagtcggtgaataagctgcatcacgatgttggtgtggttcaggttcagaatggtgatttgagtaaacgtgttgatgccctgtcgtgggtgaagaatccggtgacggggaagttgtggcgcaccaaggatgccctgtggagtgtctggtattacgtgttggagtgtcgtagccgtattgacaggctggagtctactgtcaacgatttaaagaagtgatgtgttgtgggtagacagttttggttgggtttgtttgagcgtgccctgaaaacttttattcaaacgtttgttgccgtgttgggtgttactgcgggtgtgacttatactgtggagtcgtttcgcggtttgccgtgggagtctgccctgatcacagccacggttgctgcggtgttgtcggttgctacctcgtttggtaatccgtcgtttgtggccggcaagcctggcaagcagccccaggtggatgcgggtttggttccaccggatgatgggggcttggttgagccgcactcggtggatgtgtcggatcctggcatgattgagcctgtagatgatgcggatcttggtgtgggctatgtgccgaaacatgctgccgagtctgaggttggcacggtagagtctactgttgcataagtgaatatatgtgtgtgccccagcggtgctgccacgatcgtgtggtggctgctgctggggcactatttttgtttatgcggtgtggctatgattcgttgctgtcgatggtgtcttcgagcatctggtacaggtggaggcaggtgcagatggtttcgctggcctggtcgagaacggttcggccgataacgtttttgtggttgtcgcggtggcggatgatagcccacatgatttcgtcggctgccgcctgtaatagtttggcctggtatgcgattccggcgagccagtctagtgcttcctggctcgcgtagggtgtctggtcctcgctgttgccgcgggtgttgctgttgcttgggtgtcctgcactgtcgcatagccacaggatttcgctgcactcgtctagcgtgtcctggtcgatagcgagatcgtcgaggctgacttctttgacggtaaggttcacattgtcgagtgagatgggtatacggtactggttttcgacactgtcaacaatgttttccaattgctgcatgttggtgggctgttgttggacgatacggtgtactactgttttgagggcagtgtaggggatattggttgtgttgtccatcgtgttatgccattccttcgttatcgtctggcatgtagtatgtgctgtttgcgtagcctgttagggtgatgagtgtttggtctgcccactgtttcacggtttgccgggtgactccgagtctctgggcggctgtggcgtaggtttgatcgtagccgtatacttccctgaacgcggcgtgcctggctagccgtttccgctgtttggatggctggcaggtgagggtgtagtcgtcgatggcgagctgtaggtcgatcatggtgacaatgttgttgccgtgatgctggggggcggttggtggtggtggcattcctggttcgacgcttggtttccatggtccgccgttccagatccattgggcggcttggatgatgtcggcggtggtgtaggttcggctcactggtcatcccctgaataggttgtcgaggttttcttggttgctggtgttggtggtgtcgaatcgtcccacacagtggcagtagtcgtacatgagtttgataatgtgttggtggtctcccatataggtgtttccgctgatgctgtaggtggctgtgccgtctttactgatggtgtatttggcggtgatggtttcgggtgtttctgtgttggtgatgatggcggtggtggtggcgcctactgtttgtagcctggtggtttgggtgccgtcgtcgagaatggttgtgaccatggtgtgtgttctcccctttcagatgcttgtttggttgtcggctagatgaatgatatcgggtaagggtttcggctggtctaaatgttgtgtggttttgttggctagccgtttggctaccctgtagcacattttggtgtagtgtttgttgtctaggttgtggtattgttcccgcaccgcaatatatagtagggagtcttggtagaggtcgtctgcgctgattgcggggtagtgtgcggctgttttggtgcatgcccggttgagtgtgcgtagatgatggtctgcggcccacacccacgatgcggtggtggccaggtcggcttttgttggtcgtctgctcatggcactatttcatctcgctatctggtagttgtttggtgttttgttgtggatagtgtagcacactagtccggggttgcctgtggtgcctgtgcggcgccggtaccagacggattctccttccatggatgggcattggatgaaggtgcgttgtccttgctcggagatttctaggtggtgccggtgccctgccatgaggatgtgggatgtgttggctttg

SEQ ID NO: 81 - DNA, 9965 bp, Pahexavirus sp.
  source 1..9965: mol_type = genomic DNA
gggcggatgatagcccacatgatctcgtcggctgccgcctgcaatagtttggcctggtatgcgattccggcgagccagtctagtgcttcctggcttgcataggggctctggtcctcgctgttgtcacgggtgttgctgttgtttgtggggcgtcctgcactgtcgcataaccacaggatttcgctgcactcgtctagcgtgtcctggtcgatagcgagatcgtcgaggctgacattgttgacggtaaggttcacgttgtcgagggagatgggtacaccgtactggttttcgacaccgtcaacaatgttttccagctgttgcatgttggtgggctgttgttggacgatacggtgtatcgctgtgttgagggtggtgtaggtgatattggttgtgttgtccatcgtgttatgccattccttcgttatcgtctggcatgtagtatgtgctgtttgcgtactcggttaacgtcatcagtgtttggtctgcccactgtttcacggtttgtcttgtcacacccaatcgttgggcggctgtggcgtaggtttggtcatacccgtatacttcccggaatgctgccagcctagctagccgtttcctttgtttggatggctggcaggtgagggtgtagtcgtcgatggctagctgcaaatcgatcatggtgacaatgttgttgccgtggtgttgtggcgcggttggtgggggtggcatgcccggctccacactgggtttccatggtccgccgttccagatccattgggcggcttggatgatgtcggctgtggtgtaggttcggctcatgtgtcatcccctgaataggttgtcgaggttttcttggttgctggtgttggtggtgtcgaatcgtcccacacagtggcagtagtcgtacatgagtttgataatgtgttggtggtctcccaaataggtgtttccgctgatgctgtaggtggctgtgccgtctttgctgatggtgtatttggcggtgatggtttcgggtgtttctgtgttggtgatgattgctgtggtggtggcgcctacggtttgtagcctggtggtttgggtgccgtcgtcgagaatggttgtgaccatggtgtgtgttctcccctttcagatgcttgtttggttgtcggctagatgaatgatatcgggtaagggtttcggctggtctaaatgttgtgtggttttgttggctagccgtttggctaccctgtagcacattttggtgtagtgtttgttgtctaggttgtggtattgttcccgcaccgcaatatatagtagggagtcttggtagaggtcgtctgcgctgattgcggggtagtgtgcggctgttttggtgcatgcccggttgagtgtgcgtagatgatggtctgtggcccacacccacgatgcggtggtggctaggtctgctttggttggtcgtctgctcatggcactattaccttgctatccggtagttgtttggtgttttgttgttgatagtgtagcacacgagtccggggtttccggtggtgcccgtcttgcgccggaaccatgtggattctccttccatggatgggcattgaatgaaggtgcgttgtccttgctcggagatttctaggtggtgccggtgcccggccatgagtatattagatacggtgccgttgtggaattcttggccgcgccaccaatcatagtgtttgccggtgcgccattggtgtccgtgggcgtgcaggatttgtgtgcctgccacgtcgacggtggtggtcatttcgtctcggctggggaagtggaagtgtaggttggggtattggttgttgagctggtaggcttctgcgatggcgcggcagcagtccacgtcgaaggagtcgtcgtaggtggtgacgcctttgccgaagcgtacggcttctccgtggttgccgggtatggatgtgatggtcacgtttttgcagtggtcgaattggtggatgagttgcatcatggccatgcgggtgagcctgatttgttccgtcaagggtgtttgtgtgcgccaggcgttattgcctccttgtgacacgtatccttcgatcatgtcgccgaggaaggcgatgtggactcgttgcggtttgccagcctgttgccagtagtgttttgcgactatgagggagtgtaaatagtcgtcggcgaagtgtgctgtttctccgccggggatgcctttgccgatttggaagtcgcctgccccgatgacgaaggctgcagtgctgtagtcggtgcgggtgtcctgttcgggttttggtggctgccattcggctagtttgttgacgagttcgtctacggggtgggggtttgttgtgggttggtggtcgatgattttttgtatggatcggcctgtttctccgttcggtaaggtccattcggagatgcgtgtgcggcgtacggtgccgtttgcgagatcatcattaatggtgtcgatggcgttgtcgtggttggctagctgtgtgagtagtcggtctatgttgtctatcactggttttcctcttttgtttgcggggtgttggcttgtttgcggcggtagtctttgatgacggtggctgagatggggtatccggcttgggtgagttgttttgctagccacgaggcggggatggttttgtctgcgagcacgtctgctgctttagccccgtagcgttgaataagggtttcagttttggttgccatggtgtcctaggggttgtgtggtgggctgccatcctgtgcggcagtcgccgtcgtgtcctggtttgcgtgtgcaccatgtgatggttccgtctgtgtggttgagtgttttgccgcacatgacgtcacgtaggtgttcgggaaacttgccgttgttgtccttgttcgtgtcggtcacgtgttgggttgtggtgaccatcatgcctcctatgtgtgaaagagtgtgcacatactgtgctggtgtggtgggtgtttatgcgggtatggttttcatcaccttgctgaatgttacttggttattgtacatcatttgggtgatgtcctgatccgttttgtcggggtgctgttttcgtaggtttgcccattggcaggcgttgtcggtttcttgctggagccgggtgagattgttttcggtgatgatttgtttccacattgtccatgacacgtcgagccggttgaggatttcgagggctgggatgttgaactggtcgaggaacaggatttcgtgggtgtagtagtttttctagtaggcgtcccatccgcttcggtgcctgtttggctggtttttggggtaggcttcccggcatactttgtgtaaacgcttggccatgtcgtcgggtagtttaatgtcggggttggcgcggatcatggatcgcatcccatcataggtggtgccccaggtgtgcatggtatgtagtgggttttctccatcagcccatttttctgcacagatggcgaggcggatacgcctcctggcggccttactcgtgtcgcggcggccggggatggggcatgtgtcgaggggatccatgatgttttagtgtacctttcttgaggtgatgtttgcttgtctggttttattgtagcactgtgtctagtgcttgtgtcaaccctgtttttccggcctgcagataggtgtctgtgacatcgcccagggtgaggggcacgcgggtggcttgggggagtgccgtctggagggtttgggccatctggtctcctgctttgtcggggtctgaccagatgtagatgtggtcgtagccttcaaaaaatttggtccagaagttttgccacgaggtggccccgggtagggctacggccggccatccgcattgttcgaggatcatggagtcgaattcgccttcgcaaatgtgcatttcggctgccgggttggccatggcggccatgttgtagatggagcctgtgtcccctgccggggttaggtatttggggtggttgtgggttttgcagtcgtgttggagtgagcagcggaaacgcatttttcgtatttcggctgggccgccccaaacggggtacatgtatgggatggtgatgcactggttgtagttttcgtggcctggtatggggtcattgtcgatgtatccaaggtggtggtagcgggctgtttcttcgctgatgcctcttgctgagagcaggtcgagtatgttttcgaggtgggtttcgtagcgggctgaggctttctggatacggcggcgttccgcaatgttgtagggttgtagtgagtcgtacattcgggtttctttcttctaatcgttgtttcagtttggcgaggcctcctccgatgccgcatgtgtggcagtaccagacgcccttgtcgaggttgatgctcatggagggctggtggtcgtcgtggaacgggcagaggatgtgttgctcgttcctggatggattgtagcgtatctggtaggtgtcgaggaggcggcaggtgtcagaggtgtgggaggagctcgttgagggttgataccacataggcttcgctccatggtttgttgcgctgtttcatcactacgagtccgatggtggaattgttttgtttgtttcggtgtgtttcgtagttgcgtgcttctcggctggcttgtttgacgaattgggctagatgctgctgtcctgctttggcttctatcacataggttttgtggctggtggtgaggatgaggtcgccttcgtcctctttaccgttgaggtggaggcgttctatatcatggccgatgtgacggagctggtggaggagtcgtgtttcccattctgcgccggcccggcggttgcgtgactgttgtgtcgacatgatagtcctttgtgtgttggggtcatgttccatggctgtttttcggcgaggggcccgaagaatgtgtattcggggtaggctcgcagtcgttcgtatcgggttccgtctgggctggatttgcctgtgcgctgtttcaacactgcgatgcgtgcctctgccggtatcgataggccgttgccattatcctcgccaccatacaatgatactccgagaatgagttgtggtttttcggagaggccgtttttgatttcgcggcgtgccggggggtgttcgatgtcggagccggttttgtcggttgcgtggtgtgtgacaataatggtggagcccgtgtcgcggcctaatgctgtgatccattgcatggcttcttgctgggcctggtagtcactttcgcagtcttggatgtccatcaggttgtcgatgacaatgagtggtgggaaggtgttccacatttccatgtaggcttgtagctccatggtgatgtctgtccaggtgatgggtgactggaatgagaatgtgatgtgcgcgccgtggtggatgctgtctcgatagtattctggcccgtagtcgtcgatgttttgttgtatctgggcggtggtgtgttgggtgttgagtgagatgattcgtgtggaggcctcccagggtgtcatgtcccctgatatgtagagggcgggctggttgagcatcgctgtgatgaacattgctagcccggatttttggctgccggagcgccccgcaatcatcaccaaatcccctttgtggatgtgcatgtccaggttacggtagagggggtctagctggggtatgcggggcagctcggctgcggtttgggaggctctctcgaaggatcgttgtagagagagcatcgggaccttatctatctatcggttggttgtattggtggtcagatggagtcgatatcgatgtcagtagaggctgtggtgtcgtctagctggccgttatcgcgcttgtctacatattcggcaaccttatcatagatggcgtcgtctaatggtttgagcacgaccgcgttgaagccgtttttggtgcgtacggtggcgagtttgaaggcctgctcctcgccaaggtatgcttcgaggtcgcggatcatggagtgtgggcggtcgttgttgccgcgtgctttctcaataatagcgttggggatggtttctggggtgctgttgttgagatcgtctagggtgtggaagattgtgacatcagcgtagatgcggtctgcgacctgtccgccgtagccttcagtgttgtgctgaacgtcgcggactttgaaggcgatggcggtggcgtcctggtttctggaggggttgaagaaggtgctgttgctgttgttgttgcggtagttggcgagtcccattattgtatcctttactgttttgttggtttgtgtcggtttttatcgggtgaggctgtttcgtttgctgcggaaagcctcggatacgtcactgttgctggtgatggtcttcttgtactgtttgaggaggtctgctagctgtgctttgcttgtggcattgttaattttgtcgatgacgatgtcgtttccttctgaggcgatgttgtctacgtagtctttggcggcctggttgtatcggtcttggaggatgatggatgctgtggcgatcagtgttgccaggtcccagttccttgccgcggagctgtttttgagtccgcctagcaggtcgatgatagtcttctttacctggtcggcggtgtctccgcggatgacggtccatggggcggcgtagtcgcctccgtatttgagtgtgacggtgaatcggtcgtcgtctgtgttgtcggtcactggtgctccttgtcttcttttgttggggctgtgatggtggtttctatagggtacctgtaggcgtctttcccgttgacagcccagcaggcgtccttgacggggcagcctttacagagtgctgtgacatggggtacgaagatgccttgactgattcctttcattgcttgactatacatggatgatacatgctggtaggtgttgttgtcaagatcgtagagttcggtggatgtgccttgtgtcggggacttgtcgtcattgcggctggtggctggcgtccaaaacatgcctttcgtgacatggatgccgtgttgttctagcatgtacctgtatgtgtgcagctgcatactgtcggcgggtaggcgtccggttttgaggtcgaggataaatgtttcacccgtattcgtatctgtgaatacccggtcgatgtagccgacaatagtggtgccatcctggagggtggtttctaccgggtatccgatgcctggctggccgtccaggattgcggtgatgtattctggatggttgcgcctccatgttttccagcggtctacaaaggtggggccgtatatcatccaccaattgtagtcttttttgtgtggcccgcctgactcgcacatgtttttgcatattctgccggagggtctgatgtttgtgccttcggattcagcgagggcgacttgggtgtcgaacatgtttgtgaaggatgagagtttgtctggcagtgcagggtattcggcgggattgtacaggtgtaggtcgtattgttcggtgatgtggtgtatggcgcttccggcgatggtggcgtaccaggtgtgggaggtggctttgtatccgtgttggaggcgcgatttttctccgcattcggcccactgggtgagtgaactgtaggagatgtggcctgggtggttgatggttttcgggggttgtgctagaggcatgttagttgtttttgttccatgggttgcgggtgtcttggccggcctggtgttgctggtaggcaaggagtgcgaggcagtgccaggcagcatgggctagatgcggtagcccggattcgcggtcgaggttgttgccttgctgccatgatagtagatgcctatagagggcgtcgacactgtggctccacgggtatcctccggtccagttgttgtcgccgtatttggtggcaccgtagcctgccacagagcctagatcgtgcaaggctgcggggtcgatgagggatagcctgcagagttttaattcttttcgggcaccagtatcagggtcggtgtacatgctggtgggttcatccatggtgtgtgtgctccttgagtgtggggttactggttggggttgtgggctagggcgacggcgagaatgatgatgacgagggtttctgcgataaggatgggtgttgtgatcatttgctgtctcggggattgttggtgagtgttgaggcgcctaggagggtggcgagggcgcatgcggcaatgatgacgagggcggctttatggctggttcctgttgcgtacatccatgtgatgatgccgccttgaatccatgccagtgtggtgaagaacgtttcgtaactgtgtagctcaatgttgttgggtgtgttcatgcttgctcctgaagaatggtgttgatggttttataaatgttgtacaggtctgtttcgatagataacagttggtggatttcgtggtcgagatcaatgtctgggttgagggtgttgatgcgggaggcaatatcggtggctgtgcgtagtgtgccgccggtgtggtgaatgatgtgtgctgtgtcggcgagtcctgtggtgacagcgtagtgggataggagaggcatagctggggggtgctccttggcgggttactgttgcgggttgatgttgaggtcggtgacgtgtgggtggtcttctgttccggtgacgaggcagtggacggtgacgggtagtttggatgctcccggctggcggacggtggcgccgtagacgatggagaaggtgtctttgccaataattttgtggagttggaggtcgatgtcggggttgccgttccagttgacaccgtgtgcggcggcctgttgttcggctttgcggttgcaggtgtgtgctgccgtgatcatggtgagttcggtggcggtttcttccccccttgcttgggcttgcttgtgggctttggcctgctcggctcgcagtgactgttctgcggctgcctgccgtgccgctttctcggctttgcgctgttgggtagtcttgggggtccattcagtgttggctgtggtggcctgtggggctggctgtgaggcgagtggcggattgtcgtctggggctggcatgaatgaggcggcggcgatgatggcggctgtgattctggcgatggtgtagcctgttttcttgttcatgactgttgtcccctttccggggtgttgttcgttgctgacatgatcaatacttccagtgactggacctcgtgtcaaggctgcgctcaacgattgtgagcgatcattgtgtggctaggggttttatccttgaggtatgacaggtcacgtcctgtagtccagtagccgagacgattacgcttcatacccttcgcctccatctcgtccacggtgaggcacctgcggcgattggggccttccttgactccatggtcgcctacccggtgcatgtcgcctgaggtggtactcgtgaatgtttcgtggcagactgtgcagtgttctggtcggtatccggtgattgtgctatcgcacttgtggcatgtccattgcatgattcgttcttctttcgtgttttaagcttgtactctgaggattagagcgactttcagcccttgggggtacaactatataggtcaggtatttctaggcgattctaggctcgttgtgtgtggttggggtttatcgggcgaacagggtgagcaggtgtccgatgttgatgcgggtcacattccagtagagttgtgtggcttctccgccggtgagtggcttccactcgttgtggctgaacacggtgccatcggatgcgatgaatgtgttggggcgtagcttgtggagttcggcttccacgctctgccggtaggcttcggcgaggccctcaaaatccatgtggtcgcaggagaggttttcgaggcgtgtcaggtcgaagggtgtggggcagtcgtagctggcgggggtgtagagctgggtgaagtggttggcgatcttctgcatcatgattccttttctcgtgtggttggggttttatcgtgtggcttcggcaatgatggcgtccacatcgattgtgtcgatcatgtcgtggaggtcctcagcctcatccgcggtgagtggctgccggtcctggggtccgtatatggcaccgtcgagggtgacagtccacaggggccggatgagtcgtacggcttcttcgactttggcacggtgcaggcg

SEQ ID NO: 82 - DNA, 16725 bp, Pahexavirus sp.
  source 1..16725: mol_type = genomic DNA
acttaaggttataaataaacgttaaagctttaaagtcttaaagtaactataaaaccttaacagttaaacacttaaagctttaaaccttaacacttaagttaagtataaaaccttcaaggcttagcacttaaggatataaactttacatcagtgtttaagactttaaaacttaaagtaattattaaaacttaaaggtttataagctttaagcacttaaagtaattataagactttaaagaccttaagtacttaaagttaaccatcagtcttaaactttaatattataacctataagtcttaaagcttataagttataaaagttttagaagagctaaggggttaacttctttacttctcttctctctttggttctttctctcttctcttcttttcttcatcaggggagaagaggaacctttaccatcagcaccgatgggctttcaccgtgtgtctcgtgtatcaccggtcgcacgctcccggtttgtacactccccacaccctttcacccgtgtccctttacggcttggcgtgttcggctgaaggcgtacggcgtgtcacgcttaaacccttaacaccaggtaagacttaaagtacatattataagtagaagactttaaaactcctaaggtgttcccgcttagcctgtgtcttacaccgctaggcgctaggcttttaaacgcgaacacccatccacccccatttttcttccgtgtccttctctttcaacaccgctggggggcgatgtgatctttttcacataccaagggggtagtggagaaaacaaacaccccagcaagttcaagacaccccctcaaacgcacaaaacagggcctaggatcgaacagcagggcaccggtagagtattcatacccccagacgattccaggacgttacaggagcaatgagaggctcacaggggcaaggggagatcaggggacgtgatggcacacaccaaccgcaccgcatccgcctcacaccggcgctggcggcaacgactcatcacccaagcccaacaacgaggccaaaccgaatgcccactctgcggagcaaccatcacctggaacacccatgatctaccaacaagccccgaagccgaccacatcacacccgtcagcaggggaggactcaacaccctcgacaacgggcaaatcatctgcagaacatgcaacagaagcaaaggcaatcgcagcgaaccaaacatcaaattccaacaacaaaccacaaaaacattgattccatggtgaaaaacccgccaacccccaccggggacaccccctgcacacccgtgcaagacctcgtacggcttagtgaaatacctcccttttgtggttttgtctgtttgtcgactttttgtgttggtggtgagtgttgtgcagcctgagcttcctgatagtcgtgagtggtgtggggagacgcgtcgttggtggcgtgtgtggggtgaggatagtcgcgcgcagtatgtgtctgatgaggagtggctgtttttgttggatgctgctgtgattcatgattgtgtgtggcgtgagggtcgcgccgatttggtggcttcgttgcgtgctcatgtgaaggcgtttatgggcatgttggatcgttattcggttgatgtggcgtctggtggccgtggtggcggttctgcggtggcgatgattgatcggtataggaagcgtaggggggcctgattaggtgtctggtgttgttgggtctcaggttcctcgtcatcgtgtggctgcggcgtattcggtgtctgctggcggtgatgcgggtgagcttggtagggcttatgggttgacgcctgatccgtggcagcagcaggtgttggatgattggcttgctgtgggtggtaatggcaggcttgcttcgggtgtgtgtggggtgtttgtgcctcgacagaatggcgagaacgcgatccttgaggttgtggagttgtttaaggcgactattcagggtcgccgtattttgcatacggctcacgagttgaagtcggctcgtaaggcgtttatgcggttgaggtcgttttttgagaatgagcggcagtttcctgacttgtatcgtatggtgaagacgattcgtgcggcgaatggtcaggaggctattgtgttgcatcatccggattgtgccacgtttgagcgtaagtgtggctgtccgggttggggttcggttgagtttgtggcccgttcgaggggttctgctcgcgggtttacggttgatgatttggtgtgtgatgaggctcaggagttgtcggatgagcagttggaggctttgcttcctacggtgagtgctgccccgtctggtgatccgcagcagattttccttggcacgccgcctgggccgttggctgacgggtcggtggtgttgcgtcttcgcgggcaggctttgtcgggtggtaaaaggtttgcgtggacggagttttcgattcctgacgagtctgatccggatgatgtgtcgcggcagtggcggaagttggcgggggatacgaatcctgcgctgggtcgtcgtctgaattttgggaccgtaagcgatgagcatgagtctatgtctgctgccggttttgctcgggagcggcttggctggcgggatcgtggccagtctgctgcgtctgtggttcctgctgataagtgggctcagtctgcggtggatgaggcgagtctggttggcgggaaggtgtttggtgtctcgttttctcgttctggggatcgggttgctttagcgggtgccggccggactgatgctggggttcatgttgaggttattgatgggctgtcgggaacgattgttgatggtgtgggccggttggctgactggttggcggttcgttggggtgatactgaccgggtcatggttgccgggtctggtgcggtgttgttgcagaaggcgttgacggatcgtggcattccgggccgtggcgtggtggttgctgatactggcgtgtttgtggaggcgtgtcaggcgtttttggagggtgtcaggtcgggtgtgatcagtcatcctcgtgctgattctcgccgtgacatgttggatattgctgtgaggtcggctgtgcagaagcgtaaggggtctgcgtggggttggggttcctcgtttaaggatggttctgaggttccttaggaggctgtgtcgctggcgtatcttggggctgaacgtgttcgttgtggccgtcgggagcgtagtggtgggaagcgggtgtctgtggtatgaactcggatgagttggcgctgattgagggcatgtttgatcgtatccaaaggttgtcttcgtggcattgccgtattgagggctactatgagggctcgagccgggtgcgtgatttgggggtggctattccgccggagttgcagcgtgtgcagacggtggtgtcgtggcctggtatagctgtggatgctttggaggagcgtctggattggcttggctggactaatggtgacggctacggtctggatggtgtgtatgctgcgaatcggcttgctacggcgtcgtgtgacgttcaccttgatgcactgatttttgggttgtcgtttgtggcgatcattccccagggggatgggtcggtgttggttcgtccgcagtcgccgaagaattgtactggccggttttctgctgacgggtctcgtttggatgctggccttgtggtgcagcagacgtgtgatcctgaggttgttgaggcggagttgttgcttcctgatgtgattgttcaggtggagcggcggggttcgcgtgaatgggttgaggtggatcgtatacctaatgtgttgggtgctgttccgcttgtgcctattgtgaatcgtcgacgtacttctaggattgatggccgttcggagattacgaggtctattagggcttacacggatgatgctgttcgcacactgttggggcagtctgtgaatcgtgatttttatgcgtatccccagcgttgggtgactggtgtgtcggctgacgagttttcgcagcctggctgggtcctgtcgatggcttctgtgtgggctgtggataaggatgatgacggtgatactccgaatgtggggtcgtttcctgtcaatagtcctacaccgtattcggatcagatgcggctgttggcccagttgactgctggggaggctgctgttccggaacgctatttcgggtttattacgtctaacccgccttcgggtgaggcgcttgcggcggaggagtcgaggcttgtgaagcgtgctgagcggcgtcaaacgtcgtttggtcagagctggctgtcggttggtttcctggccgccaaggcgcttgattcttctgtgaacgaggccgatttttttggtgatgtgggtttgcgttggcgtgatgcttcgacgccgactcgggctgctacggctgatgctgtgacgaagcttgtgggtgccggtattttgccggcggattctcggacggtgttggagatgttggggcttgatgatgtgcaggttgaggctgtgatgcggcatcgtgccgagtcttcggatccgttggcggcgctggctggggctatttctcgtcaaactaacgaggtttgataggcgatggcttctggggttgcgtcgaggcttgcggctaccgggtatcagcgtgaggcggtcaggtttgccgggaagtatgcgggctattattccgagcttggtcgtttgtggcattccgggaagatgacagatgcgcagtatgtgcgtttgtgtgtggagttggagcgtgccggccatgacggttccgcggcgctggcgggcaaattcgtgtccgattttcggaagcttaacggtgtcgatcctggtttgatcgtgtatgacgagtttgatgctgccgccgcgttggctaggtcgttttcgactatgaagatgatgaatagtgacccggatagagcgaatgatactattgatgcgatggctgcgggtgttaatcgggctgtcatgaatgctggccgtgacacggttgagtggtctgcgggtgcgcagggtaggtcgtggcgcagggtgactgatggtgatccgtgcgcgttttgtgccatgttggctacgaggtcggattatacgaccaaagagcgggcgcttactactggtcatacgcggcgtcataagcgtgccggtaggcgtccgtttggttcgaagtatcatgatcatcgtggttgtacggtggttgaggttgttggcccttgggaaccaaatagggctgatgccgagtatcagaggacgtatgagaaggcccgtgagtgggttgatgatcatgggttgcagcagtcgcctggcaatattttgaaggctatgcgtactgttggcgacatgagatgatggtttccggttgtgcgctgccggttatcggtgcacagggttgtctcccgcacgggggtcaacaatgttgtgttgttttccgcaaggagtatagggtttggctatggccgatcagagtgttgaggaacagaatgttgacaatgatgctgttgagcccggaaagggtggaggcattgttgatgttgtgaaggatgagcaggctgccggcgatgatcatgccggtgatgtttccgtgaagggtgaggtttctgggccgtctggcacggattggaaggctgaagcccttaagtgggagtctcgtgctaaaagtaatttcgccgagttggagaagcttcgtacatcgagtgacgattctggatctactattgatgagcttcgccgctagaatgaggaactcgaagacaggatcaacgggtttgttcttgagggtgtgaagcacgaggtggcttcagagtatggtttatccagtgatgcgatcgctttcttgtcgggtggcgataaggagtcgcttgccgagtctgcgaaagctttgaagggtttgatcgaccatagtagtggtggcgcgggtgtgcgccgtcttgcggggagtgcccccgttgatgatgttaaacgacgtgagggtgtcgcgtttgtggatgctcttgtcaataattctaggagatgatttgtgatggctgacgattttctttctgcagggaagcttgagctacctggttctatgattggtgcggttcgtgaccgtgctatcgattctggtgttttggcgaagctttcgccggagcagccgactatttttggccctgttaagggtgccgtttttagtggtgttcctcgcgctaagattgttggtgagggtgaggttgagccttccgcgtctgttgatgtttcggcgtttactgcgcagcctatcaaggttgtgactcagcagcgcgtaagcgacgagtttatgtgggcggatgctgattaccgtctgggtgttttgcaggatctgatttcgcctgctcttggtgcttcgattggtcgcgctgttgatctgattgctttccacggtattgatccggctacgggtaagcctgctgcggctgtcaagtcttcgctggataagacgaagcatattgttgatgccacggattctgctacgactgatcttgttaaggctgtcggtcttatcgctggtgctggtttgcaggttcctaacggggttgctttggatccggcgttctcgtttgccctgtctactgaggtgtatccgaaggggtctccgcttgccggccagcctatgtatcctgccgccgggtttgctggtttggataattggcgtggcttgaatgttggtgcttcttcgactgtttctggcgccccggagatgtcgcctgcctctggtgttaaggctattgttggtgatttctcgcgtgttcattggggtttccagcgtaacttcccgatcgaactgatcgagtatggtgacccggatcagactggccgtgacctgaagggccataatgaggttatggttcgtgccgaggctgtgctgtatgtggctattgagtcgcttgattcgtttgctgttgtgaaggagaaggctgcaccgactcctcctccggctggtaactgatacaagataagcgaatgtgtactatgtgcagggggtggtgttgatgggtatcattttgaagcctgaggatattgagcctttcgccgatattcctagagagaagcttgaggcgatgatcgccgatgtggaggctgtggctatcagtgtcgccccctgtatcgctaaaccggatttcaaatacaaggatgccgctaaggctattctgcgcagggctttgttgcgctggaatgatactggcgtttcgggtcaggtgcagtatgagtctgcgggtcctttcgctcagactacacggtctaatactcccacgaatttgttgtggccttctgagattgccgcgttgaagaagctgtgtgagggtgatggtggggctggtaaagcgttcactatcacacccactattaatgctcgatatgcacattctgaggtgtgttccacggtgtggggtgagggctgttcgtgcgggtcgaatattaacggctgcgatggccctttgtgggagatataaggatggctggttttcctttcggtgaaacggttgtgatgcttcagccgactgttcgtgtcgatgatcttggtgacagggttgaggattggggtcatcctgtagaaaccgtgtaccataatgtggcatctattcttctgtgtcacaggaggatgaggcggcaggccgtgactctgactatgagcattggacactgctttttaagcagcttgtcaaggatgctggttatcggtgtcgttggcgtataaggggtgttgtgtgggaggctgacgggtctcctatgatgtggcatcatccgatgactggctgggatgctggcacgcagatcaatgtgaagcgtaagaagggctgatagattgtggctcaggatgtgaatgtgaagctgaacttgccgggtatccgtgaggtgttgaagtctcctggggtgcaggctatgttggctgagcgtggcgagcgtgtcaagcgtgcggcctcggcgaatgtgggcggtaacgctttcgataaggcccaataccgtaatggtttgtcgtcggaggttcaggttcaccgtgttgaggctgtggcacgtgttggcaccacctataagggtggcaaaaggattgaggcgaagcatggcacgctggcccggtcgattggggctgcgtcgtgatcgtctacgatgatcccaggaagtgggctaaacgtgtgctaggggatgatggctggctgtctgatataccgtgcactggcactgttcctgaccggtttgagggtgacttgatttggttggcgttggatggcggccccgagttgcatgttcgtgagcaggtgtttctcagggtgaatgtgttttcggatactccggatcgggctatgtctttggcgcgtcgtgttgaggctgttctggctgatggtgttgacggtgacccggtggtgtactgtcgacggtctactggccctgatctattagtggatggtgcacgttttgatgtgtattcgctgtttgagctggtgtgtcggcctgtagagtctgagtaaacgtatttgtttattgttttagttttattgtttttgttgattgttttttgggggttgtgatggctgctacacgtacggcgtctaatgttcgctctgctgttacgggtgacgtctatattggtaaagctcacgctggtgacactattgatggtgtgaagacggttccggatgggttgactgctttagggtatctgtcggatgatgggtttaagattaagcctgagcgtaaaacggatgatttgaaggcttggcagaatgcggatgttgttcgcactgtggctacagagtcgtctatcgagatttctttccagcggatcgagtctaagaaagaggttatcgaactgttttggcagtcgaaggttactgccggagccgattcgggttcgttcgatatttcacctggtgccacgacgggtgttcacgccctgttgatggatattgtggatggcgatcaggttattcgctactatttccctgaggttgagttgattgatcgtgacgagattaagggcaagaatggcgaggtgtatgggtatggtgtgacgttgaaggcgtatcctgcccagattaataagaagggtgaggcggtgtctggtcgggggtggatgacggctttaaaagctgatactcctccgactcctcctacgccgcctaagcctgagccggatccgaatccgccgtctaataactgatacacatagtttgagggattgttgatagatgagtgacacaggttacacgttgaagattggtgaccgtagctgggtgttggcggatgcggaggaaacagcgcaggctgttcctgcccgcgtttttcgccgtgccgccaggattgcccagtctggggagtctgctgatttcgcccaggttgaggtgatgttttccatgttggaggctgccgccccagaggatgctgtggaggctttggaggggcttcctatggttcgtgttgccgagattttccgtgagtggatggaatataagcctgacggtaagggtgcctcgctgggggaatagtttggctccacggcctgattgatgattatcgtggggccatcgaatacgatttccgcaccaagttcggtgtttctgtttatagtgttggtggcccgcagatgtgttggggtgaggctgtccggctggctggcgtgttgtgtaccgatacgtctagccagttggcggcccacctgaatggttggcagcgcccgtttgagtggtgcgagtgggctgtgctggacatgttggatcattacaggtctgctaatagtgaggggcagccggagcctgtggcgaggccgacggatgagcgtagggcccggtttacgtctgggcaggtggacgatattttggcgcgtgttcgtgccggtggcggggtgtctcgcgagattgatattatggggtgaatagtgtatgtctggtgagattgcttccgcatatgtgtcgttgtatacgaagatgcctggccttaaaagtgatgttggtaaacagttgtcgggtgtgatgcctgctgagggtcagcgttcgggtagcttgtttgctggcgggatgaagttggcgcttggtggtgcggcgatgatgggtgccatcaatgttgctaagaagggcctcaagtctatctatgatgtgactattggtggcggtatagctagggcgatggctattgatgaggctcaggctaaactgactggtttgggtcacacgtcgtctgacacgtcttcgattatgaattcggctattgaggctgtgactggtacgtcgtatgcgttgggtgatgcggcttctactgcggcggcgttgtctgcctcgggtgtgaagtctggcgggcagatgacggatgtgttgaagactgtcgccgatgtgtcttatatttcgggtaagtcgtttcaggatacgggcgctatttttacgtcggttatggctcgcggtaagttacagggcgatgacatgttgcagcttacgatggcgggtgttcctgtgctgtctctgttggccaggcagacgggtaaaacctcggctgaggtgtcgcagatggtgtcgaaggggcagattgattttaacacgtttgcggctgcgatgaagcttggcatgggtggtgctgcgcaggcgtctggtaagacgtttgagggcgctatgaagaatgttaagagcgccctgggctatcttggtgctacggctatggccccgtttttgaacggcctgcggcagatttttgttgcgttgaatccggttattaagtctatcacggagtctgtgaagcccctgtttgcgtcggtggatcaggggattcagcggatgatgccgtctattttggcgtggattaatcgtatgccggctatgatcactcgaatgaatgcacagatgcgcgccaaggtggagcagttgaagggcatttttgcgagaatgcatttgcctgttcctaaagtaaatcttgctgccatgtttgctggcggcaccgcagtgtttggtattgttgctgcgggtgtggggaagcttgttgcggggtttgccccgttggcggtgtcgttgaagaatctgttgccgtcgtttggtgctttgaagggtgccgctggcggtctgggcggcgtgtttcgcgccctgggtggccctgtcggtattgtgatcggcttgtttgctgccatgtttgccactaacgcccagtttcgtgcctctgtgatgcagcttgtgggtgttgtaggtcaggctttgggccagattatggccgctatccagccgctgtttggtttagttgccgggctggttgcacggttggctcccgtttttggccagattattggtttggtggctggtttggctgcccagctggtgcctttgattagtatgctggttgcccggctggttcctgttatcacgcagattattggtgcggtgacgcaggttgctgcaatgttgttgccggcgttgatgccggtgttgcaggctgttgtggctgtgatacgtcaggttgttggcgtggtcatgcagttggtgccggtgttgatgccggtgattcagcagattttgggtgctgtcatgtctgtgctgccacctattattggtcttatccggtcgttgatgcctgtgatcatgtctgttatgcgtgtggtggctcaggttgttgcggttgtgatacaggtggtggcccgtattcttgctgttgtggctccgatggtggcggccgtggtcgggtttgttgcccgtattgttggtgctgtcgtgtcggctgtggcccgtgttattgccgctgttgcccgtgttgttggatgggttgtggctcatttggtgtctggtgtggcgcgtatgggttcggtggttcaggctggctggaatcatattagggcgtttacgtctgcgtttattaatggtttcaagtcggtgatttctggcggcgtgaacgcggttgtcgggttttttgcgcggatgggttcttcggttgcttctcatgtgaggtctggttttaacgcggctcgtggcgctgtttcggctgcgatgaatgctatccgtagtgttgtgtcttcggtggcgtctgctgttggcgggtttttcgggtcgatggcgtctagggttcgtggtgctgcctcgtccgggtttaacgctgcgaggggtgcggcttcttctgctatgcatgctatgggctcggctgtgtctagtggtgtgcatggtgtgctgggttttttccggaatttgcctggcaatattaggggcgccttgggtagtatgggctccctgttggtgtctgctggccgtgatgtggtggccggtttgggtaacggtattaagaatgctttgagtggcctgctggatacggtgcgtaatatgggttctcaggttgctaatgctgcgaagtcggtgttgggttttcattccccgtcgagggtgtttcgtgacgaggttggccgtcaggttgttgccggtttggctgaggggatcaccgggaatgctggtttggcgttggatgcgatgtcgggtgttgcttcgcagcttccggatgctgtggatgcccggtttggtgtgcgatcgtctgtgggctcgtttaccccgtacgaccggtatcggcgtgctcagggtgagagtgttgtggtgaatgtgaatggcccgacgtatggtgatcctgccgagtttgcgaagcggattgagcggcagcagcgtgacgctttgaacgcgttggcttatatgtgagtaaaggggtatgcatgtttattcctgacccgtctgatcgttctggtttgactgtgacatggtcgatggatccgcggtttggcgacgagcgtgtgcttcatttgacggattatacggggtcgtctcctgtcatgttgttgaatgattcgttgcgcggcttgggtgttcctgaggttgagcatttttctcaaactcatgttggggtgcacggctcggagtggcgcgggtttaatgtgaagcctcgcgaggtgacgctgccggtgctggtgtcgggtgttgaaacggatccggatggcgggtttcgtgacggttttttgaaggcgtatgacgagttgcggtctacttttcctcctggcgaggagggggagttgtctgtgaagaccccgtctggtcgtgagcgtgtgttgcggtgtcggtttgattcggtggatgacacgtttacggttgatccggtgaacaggggttatgcgcgctatctgttgcatttgacagcttatgacccgttttggtatggggaggagcagaggtttcgttttagtaacgcgaagttgcaggattggttgggtggcggccctgttaataagaagggtacagcgtttccggtggtgttgacgcctggtgttggttcgggttgggataacctgtctaataagggtgatgtgcctgcgtggcctgtgattcgtgttgagggcccgttggagtcgtggtctgtgcagattgatggtttgcgtgtgtcttctgattatcctgtcgaggagtatgattggatcactattgatacggatcctcgccagcagtcggcgttgttgaacgggtttgaggatgtgatggatcgtttgacagagtgggagtttgcgcctatcccgcctggcggttcgaagagtgtgaatattgagatggttggtttgggtgccattgttgtgtcggtgcagtacaggtttttgagggcttggtgaatggttgatggctggtcttgttccgcagataacattgtttacgccggattatcgtcgtgtggcgcctatcaatttttttgagtcgttgaaactgtcgttgaagtggaatggtttgtcgacgctggagttggtggtgtctggggatcattctaggctggacgggttgacgaggcctggtgcacggctggttgttgattatggtggtggccagattttttcggggcctgtgcgcaaggtgcacggtgtggggccgtggcagtcctcgagggtgactgtgacgtgtgaggatgatattcggctgttgtggcgtatgctgttgtggcctgtgccttatcgttccagcatcattgggatggagtggcgtgccaatagggattatgcccactattcgggtgcggcggagtcggtcgctaagaaggcgttgcgggataatacttggcgttttccgcctgatatatttatggaggatgataagagtcgtggccgctatattaaggattttcaggcgcggtttcacgtgtttgccgataagttgttgccggtgttgtcgtgggctcggatgactgtcacggtgaaacagtttgagaatgtgaagcaggatcagcgtggtttgctgtttgattgcgtgcctgctgtgacgcgtagtcacgtgttgactgccgagtctggttcgattgtgtcgtgggagtatgtgcgtgacgccccgaaggcgacatctgtggttgtgggtggccgcggcgagggcaaagatcgtctgttttgtgaggattttgacgcgttggccgaggatgagtggtttgatcgtgtcgaggtgtttaaggatgcccgtaacacggattcagaaaaggtgtctctcttcgatgaggctgagcaggtgctgtcggaatcacaggccacgtctggttttaagatcgagttggcggagtcggatgtgttgcgttttgggcctggcagcctgatgccgggtgatttgatctatgttgatgtgggttcggggcctattgcggagattgttcggcagattgatgtggagtgtgtatcgcctggtgatggttggacgaaggtgactcctgttgcgggggattatgaggataatccgtcggccctgttggctcgccgtgtggctgatttggctgcgggtgtgcgggatctgcaaaaattttagaaaagaattgggggtttgttgtgggtattgtgtgcaagggttttgatggcgtgttgaccgagtatgattgggctcaaatgtctggtctgatgggtaatatgccgtctgtgaagggcccggatgattttcgtgtgggcactactgttcagggtgccacagtgttgtgtgaggtcctgccggggcaggcttgggctcacggggtgatgtgcacgccgaatagtgttgagacggtgacgggccagctgcctggccctggcgagacccgatacgactatgttgtcctgtctcgggattgggagcagaatacggccaagttggggattgttcctggggggcgtgcggagcgtgcccgtgacgtgttaagggctgagcctggcgtgtaccatcagcaactgttggctactttggtgttgtcgtctaacgggttgcagcagcagcttgacaggcgtgctgtggcggctcgtgtggcgtttggggagtctgctgcgtgtgacccgacccctgtggagggtgaccgggtgatggttccttctggggctgtgtgggctaatcatgccggcgagtggatgctactgtctccgaggattgagacgggttcgaagcagatccagtttggcgggtctgctgtgtatgcttacacgatcccgcttgcccgcccgtttggtagtgcgcctgttgtggtggcgtctatggcgacggcggctgggggcacgcagcagattgatgtgaaagcctacaatattactagcaaggattttcagttggcgtttattacgaatgatgggtctaagccgaatggcgtgcctgcggttgctaactggattgctgtcggcgtgtgaccgggctgttgcggctgatgttgtaatgttggggggctgtggtgtcgtggtttactcctgcaccggtggcttctatctgtacggcgttggccacggttttgggttctgttcaggcggtcacgtctaaatctcggaggcgtttgcggcggctgtcggctcaggtggatgcgatggaagagtatacgtggggtgtgcggcgtgaggttcgccggtttaacgctggtcttcctgatggggttgatccgcttgttttgcctgatctgcctggttttttgcaggattcgttggggggtgaatgatgagggagttggaggaggaaaagcggcagcgccgctcgtttgagaaggcgtctttgttgttgttgtttttgtcgcttgtactactggtggtggttgctgcgggtgctttacgtttcggggcggtatcctctgagcgggattcggagcaggcgagggcccagtcgaatggtacagccgctaaaggtttagccagccgtgtgaagcaggtgtgtacccagggtggcgtggagtctgcgcggcttcaccagtctggcttgtgtgtggatgctcagcgtgttgagcgtagcgtgcagggtgttcctggcccggctggtgagcgcggcccgcaaggccctgctggtgttgatggccgggatggtgttaatggttcggctgggctggttggccctgttggtccgcagggttccccgggtttgaatggtgtgaagggtcctgacgggctgcccggcgctaacggttcggatggtcgtgatggtgtttcgggccgtgcaggcgtggacggtgtgaacggcgctgatggcaaggatggtcgtgatggttcggctggtgagcgcggcgaggtgggcccttcgggtcctgccggcccgcaaggcgcgcagggggagcgtggtgagcgtggccccgcaggtgtgaacggatccgacggtaaagacggtaaagatgggcgctcgggggtgtctgtgtactgttccggggcagcctggttgtgaaatatagtgacggtgtggtttccacggtgtcgggctcggtggcctgccagggtgtgaaaccgtcgcctatagtgactatatcatcccacaaatagaaaggagtggctgtgatggtagtgtttggtggtggtgtgtggcgagatacattcctgcagcgcatcactcgg

SEQ ID NO: 83 - DNA, 20193 bp, Pahexavirus sp.
  source 1..20193: mol_type = genomic DNA
gccggggaggactcaacaccctcgacaacgggcaaatcatctgcagaacatgcaacagaagcaaaggcaatcgcagcgaaccaaacattagtttccaacaacaaaccacaaaaaaccttgtttcatggtgaaaaacccgccaacccccgacggggacaccccctgcacacccgagcaagacctcgtacggcttagtgaaatacctcccttttgtggatttgcctgtttgtcgactttttgtgttggtggtgagtgttgtgcagcctgagcttcctggtagtcgtgagtggtgtggggagacgcgtcgttggtggcgcgtgtggggtgaggatagtcgcgcgcagtacgtgtctgatgaggagtggttgtttctcatggatgctgcggtgattcatgattgtgtgtggcgtgagggtcgcgcggatttggtggcgtcgcttcgtgctcatgtgaaggcttttatgggcatgttggataggtattcggttgatgtggcgtctggtggccgcggtgggggttctgcggtggcgatgattgaccggtataggaagcgcaagggggcctgagtaggtgtctggtgttgttggttctcaggttcctcgtcatcgtgtggctgcggcgtattcggtgacggctggcggggatgctggggagttgggtcgtgcgtatgggttgacgcctgatccgtggcagcagcaggtgttggatgattggttggctgtcggtggtaatggcaggcttgcttctggtgtgtgtggggtgtttgtgcctcgccagaatggcaagaacgcgatccttgaggttgtggagttgtttaaggcgactattcagggtcgccgtattttgcatacggctcacgagttgaagtcggctcgtaaggcgtttatgcggttgcgttcgttttttgagaatgagcggctgtttcctgacttgtatcgtatggtgaagtcgattcgggcgacgaatggccaggaggctattgtgttgcatcatccggattgtgccacgtttgagcgtaagtgtggctgtccgggttggggttcggttgagtttgttgcccgtagccggggttcggctcgcggttttactgttgatgatttggtgtgtgatgaggctcaggagttgtcggatgagcagttggaggctttgcttcctacggtttctgcggctccttcgggtgatccgcagcagatttttttgggtacgccgccggggcctttggcggatggttcggtggtgttgcgtcttcgtgggcaggctttgtcgggtggtaagaggtttgcgtggacggagttttcgattcccgccgagtctgatccggatgatgtgtcgcggcagtggcggaagttggcgggggatactaatcctgcgctgggtaggcgcctgaatttcgggacggtgagcgatgagcatgagtcgatgtctgctgccgggtttgctcgggagcggcttggctggtgggatcgcggccagtctgctacgtctgtgataccggcggataagtggtctcagtctgctgtggatgaggcggctctggttggcgggaaagtgtttggtgtctcgttttctcgttctggggatcgtgtcgcgttggttggtgctggcaggactgatgctggtgttcatgttgaggttattgatggcctgtcggggacgattgtggatggtgtaggccagctggctgattggctggcgttgcgttggggtgacgcggaaaagattatggttgccggttcgggtgctgtgcttttgcagaaggctttaagtgatcgtggtgttccgggtcggggtgttgtggttgccgatactggggtgtatgtggaggcgtgtcaagcctttctggaaggtgtcaggtctggtgttgtgtctcaccctagggctgattctcgccgtgacatgttggatattgctgtgaggtcggcggttcagaagcgtaagggttcggcttggggctggggctcgacgtttaaggatggttctgaggttcctttggaggctgtgtctttggcttatcttggtgcgaagatggcgaaggctaggcggcgtgaacggtctggtaggaagcgggtgtctgtggtatgaactcggataagttggctctgattgagggcatgtacgatcgtatccaaaggttgtcttcgtggcattgccgtattgagggctactatgagggttcgagccgggtgcgtgatttgggggttgctattcctccggagttgcagcgtgtgcagacggttgtgtcgtggcctggtatagctgtggatgctttggaggagcgtctggattggcttggctggactaatggtgacggctacggcttggatggtgtgtatgctgcgaatcggcttgctacggcgtcgtgtgatgttcaccttgatgcgctgatttttgggttgtcgtttgtggctgttattccccagggggatgggtcggtgttggttcgtccgcagtcgccgaagaattgtactggccggttttctgctgatgggtctcgtttggatgcgggtttggtggtgcagcagacgtgtgatcctgaggttgttgaggcggagttgttgcttcctgatgtgattgttcaggttgagcggcgtgggtctcgtgagtgggtcgagacaggccgtataccgaatgtgcttggggcggttccgttggtgccgattgtgaatcggcgtaggacgtcgcgtattgatggccgttcggagattacgaggtctattagggcttacactgatgaggctgttcgtacactgttgggacagtctgtgaatcgtgatttttatgcgtatcctcagcgttgggtgactggtgtgagcgcggatgagttttcgcagcctggctgggtgttgtcgatggcttctgtgtgggctgtggataaggatgatgatggtgacactccgaatgtggggtcgtttcctgtgaattctcctacaccgtattcggatcagatgcgtttgttggcgcagttgactgcgggtgaggcggctgttccggaacgctatttcgggtttatcacgtctaacccgccttctggggaggctttggctgccgaggaatctcggcttgtgaagcgtgctgagcggcgtcaaacgtcgtttggtcagggctggctgtcggttggttttttggctgccaaggcgttggattctcgtgttgatgaggccgatttttttggtgatgttggtttgcgttggcgtgatgcttcaaccccgactcgggcggctacggctgatgctgtgacgaagcttgttggtgccggtattttgcctgctgattctcgtacggtgttggagatgttgggtttggatgatgtgcaggttgaggctgtgatgcggcatcgtgccgagtcttcggatccgttggcggcgctggctggggctatttctcgtcagactaacgaggtttgataggcgatggcttcgggtgctatgtcgaggcttgctgcgactgagtatcagcgtgaggcggtcaggtttgccgggaagtatgcgggctattatgctgagcttggtcgtttgtggcattccgggaagatgacagatgcgcagtatgtgcgtttgtgtgtggagttggagcgtgccggccatgatggttcggcgtcgttggctgccaggtttgtgtcggattttcgccggttgaatggtgtggatccgggtttgatcgtgtatgacgagtttgatgctgccgccgcgttggctaggtcgttttcgactatgaagattcttaagagtgacccggatagggcgaatgatacgattggttcgatggctgcgggttttgatcgtgctgtgatgaatgctggccgtgacacggttgagtggtctgcgggtgcgcagggtaggtcgtggcgcagggtgactgatggtgatccgtgtgctttttgtgccatgttggctacgaggtcggattatacgactaaggaaagggcgctcacgactggtcatactcggcgtcataagcgtggcggtaagcgtccgctgggttcgaagtatcatgatcattgtgggtgtacggtggttgaggttgttgggcgttgggagcccaatgctgcggacacccagtatcagcgggtttatgagaaggcccgggagtgggttgatgatcacgggttgcagcagtcgcctggtaatattttgaaggctatgcgtactgttggcgatatgcgatgaatggtttccggttgtgtgccgccggttatcggtgcacagggttgtctcccgcacgggggtcaacaatgttgtgttgttttccgcaaggagtatagggttaggctatggccgatcaaaaagttgaagaacagaatgttgacaatgatgctgttgagcccggaaagggtggagacgttgttgatgttgtgaaggatgggcgggctgtcggcgatgatcatgccggtgatgtttccgtgaagggtgaggcttctggggcgtctggcacggattggaaggctgaggcccgtaagtgggagtctcgtgctaaaagtaatttcgccgagttggagaagcttcgtgcctcggatggtgatgcggggtctgtgattgatgatcttcgccgcaagaatgaggaactcgaagaccggatcaacgggtttgttcttgagggtgtgaagcgtgaggtggctgccgagtgtggcctgtctagtgatgcggtcgctttcttgcacggtggcgatcgtgaagcattggtggagtctgctaaggctttgaagggtttgatcgaccatagtggtggtggcgcgggtgtgcgccgtcttgcggggagtgcccccgtggatgatgttaaacgacgtgagggtgtcgcttttgttgatgctcttgtcaataattctaggagatgatttgtgatggctgatgattttctttctgcagggaagcttgagcttcctggttctatgattggtgcggttcgtgaccgtgctatcgattctggtgttttggcgaagctttcgccggagcagccgactattttcggccctgttaagggtgccgttttttctggtgttcctcgcgccaagattgttggcgagggtgaggttaagccttccgcttcggttgatgtttcggcgtttactgcgcagcctatcaaggttgtgactcagcagcgcgtaagtgacgagtttatgtgggctgatgccgattaccgtctgggtgttttgcaggatctgatttcgcccgctttgggtgcttcgattggtcgcgccgtggatctgattgctttccacggtattgatcctgccactgggaagcctgccgcggctgtcaaggtgtcgctggataagacgaagaagacggttgatgcccccgattccgctacggctgatctggtcaaggctgtcggtcttttcgctggagccggtttgcaggttcctaacggtgttgctttggatccggcgttctcgtttgctctgtcgactgaggtgtatccgaaggggtcgccgcttgccggtcagccgatgtatcctgccgccggtttcgctggtttggataattggcgtgggctgaatgttggtgcttcttcgactgtttcgggtgccccggagatgtcgcctgcctctggtgttaaggctattgttggtgatttctctcgtgttcattgggggttccagcgtaacttcccgatcgagctgatcgagtatggtgacccggatcagactggccgtgacttgaagggccataatgaggttatggttcgtgccgaggctgtgctgtatgtggctatcgagtcgcttgattcggttgctgtggtgaaggagaaggctgcaccgactcctcctccggctggtaactgatacaagataagcggatgtgtactgtgtgcagggggtggtgttgatgggtatcattttgaagcctgaggatattgagcctttcgccgatgttcctagagagaagcttgaggcgatgattgccgatgtggaggctgtggctgtcagtgtcgccccctgtatcgctaaaccggatttcaaatataaggatgccgctaaggctattctgcgcagggccctgttgcgctggaatgataccggggtttcgggtcaggtgcagtgcgagtctgcgggcccgtttgctcagacgacacggtcgaatactcccacgaatttgttgtggccttctgagattgctgcgttgaagaagttgtgtgagggtgatggtggggctggtaaagcgttcactatcacaccgaccatgaggagtagcgtgaatcattctgaggtgtgttccacggtgtggggtggaggttgctcgtgcgggtcgaatattaacggctacgctggccctttgtgggagatatgatatgaccagttttccttacggtgaaacggttgtgatgcttcaaccgactgttcgtgtcgatgatcttggtgacaaggtggaagactggtctaagcctgtcgagactgtgtaccataacgtggccatctatgcttccgtttcgcaggaggatgaggctgcggggcgtgactctgactatgagcattggtcgatgctttttaagcagcctgttgtgggtgccggttatcgttgccggtggcgtatccggggtgttgtgtgggaggctgacgggtctcctgtggtgtggcatcatccgatgtctggctgggatgctggtacgcagattcatgtgaagcgtaagaagggctgatcggttgtggctcaggatgtgaatgtgaagctgaacttgtcgggtattcgtgaggtgttgaagtctcctggtgtgcagggcatgttggctgagcgtggcgagctggttaggcgtgccgcatcggcgaatgtgggcggtaatgcttacgatagggcccagtatcgtgcagggttgtcgtcggaggtgcaggttcaccgtgtggaggctgtggcccgtattggcaccacctataggggtgggaagcgtattgaggcgaagcatggcacgttggctcgttcgattggggctgcgtcgtgatcgtctacgatgaccccaggaagtgggctaaacgtgtgttggcggatgatggatggctgtccgacataccgtgtactgggacggtccctgacgatttcggcggtgatctgatttggttggcgttggatggtggcccgcagttgcatgttcgtgagcgtgtttttttgcgggtgaatgtgttttctgatatgccggatcgtgctatgtcgttggcgcgtcgtgttgaggctgtgctggctgatggtgtggacggtgaccctgtggtgtactgtaaacggtctactggccctgatttgctggttgatggtgcacgttttgatgtgtattcgctttttgagctgatatgcaggcccgtcgaatccgagtaaacgttttgtcttgatattgttttagtttattgttgttgatattttttgggggttatgatggctgcaacacgtaaagcgtctaatgttcgctctgctgttacgggtgacgtctatattggtaaagctcatgccggtgacactattgatggtgtgaagacggttcctgacggtcttaccgctttagggtatctgtcggatgacgggtttaagattaagcctgagcgtaaaacggatgatttgaaggcttggcagaatgcggatgttgttcgcactgtggctacggagtcttctatcgagatttctttccagctgatcgagtctaagaaggaggttatcgaactgttttggcagtcgaaggttactgccggagccgattcgggttcgttcgatatttctcctggtgccaccactggcgtgcacgctttactgatggatattgttgatggtgatcaggttattcgctactatttccctgaggttgagcttatcgatcgtgacgagatcaagggtaagaatggcgaggtgtatgggtatggtgtgacgttgaaggcgtatcctgcccagattaataagaagggtgatgcggtgtctggtcgggggtggatgacggctttaaaagctgatacccctccggttcctccgaagcctcagccggatccgaatccgccgtccgataactgatacacgattttagggattgttgatagatgagtgacactggttacacgttgaagattggtgaccgtagctgggtgttggcggatgcggaggagacggctcaggctgttcctgcccgcgtgttccgtcgtgccgccaggattgcccagtcgggggagtctgcggatttcgcccaggttgaggtgatgttttctatgttggaggctgccgccccggctgacgcggtggaggccctggaggggcttcctatggttcgtgtggcggaggttttccgtgagtggatggaatacaagcctgagggtaagggtgcctctttgggggaatagtttggctccacggcctgattgatgattatcgtggggccatcgaatacgatttccgcactaaatttggtgtttctgtttatagtgttggtggcccgcagatgtgttggggtgaggctgtccggctggctggcgtgttgtgtaccgatacgtctagacagttggcggcccacctgaatggttggcagcgcccgtttgagtggtgcgagtgggctgtgttggacatgttggatcattacaggtctgctagtagtgaggggcagccggagcctgtggcgaggccgacggatgagcgtagggcccggtttacgtctgggcaggtggacgatattttggcgcgtgttcgtgccggcggcggggtgtctcgcgagattaattttatggggtgaatagtgtatgtctggtgagatcgcttccgcatatgtgtcgttgtatacgaagatgcctggccttaaaagtgatgttggtaaacagctttctggggttatgcctgcggagggtcagcgttcgggtagcctgtttgctaacggcatgaagttggctcttggtggtgcggcgatgatgggcgctattagtgttgctaagaagggcctcaagtcgatttatgatgtgactattggtggcggtatagctagggcgatggctatcgatgaggctcaggctaaaccgactggtttgggtcacacgtcttctgacacgtcttcgattatgaattcggctattgaggctgtgactggtacgtcgtatgcgttgggtgatgcggcgtctacggctgcggcgttatctgcttcgggtgtgcagtctggcgggcagatgacggatctgttgaagactgtcgccgatgtgtcttatatttcgggtaagtcgtttcaggatacgggcgctatttttacgtctgtgatggcccgcggtaagttgcagggcgatgacatgttgcagcttacgatggctggtgttcctgtcctgtctttgcttgccaggcagacgggtaaaacgtcggctgaggtgtcgcagatggtgtcgaaggggcagattgattttgccacgtttgcggctgcgatgaagcttggcatgggtggtgctgcgcaggcgtctggtaagacgtttgagggcgctatgtagaatgttaagagcgccctgggttatttgggtgctacggctatggcgccgtttcttaacggcctgcggcagatttttgttgcgttgaatccggttatcaagtctatcacggagtctgtgaagcccctgtttgcgtcggttgatcaggggattcagcgggtgatgccgtctattttggcgtggattaatcgtatgccgggcacgatcactcgaatgaatgcacagatgcgcgccaaggtggagcagttgaagggcatttttgcgagaatgcatttgcctgtccctaaagtgaacttgggtgccatgtttgctggcggcaccgcagtgtttggtattgttgctgcgggtgtcgggaagcttgttgcagggtttgccccgttggcggtgtcgttgaagaatctgttgccgtcgtttggtgctttgaagggtgccgctggcgggcttggtggcgtgtttcgcgctttgggtggccctgtcgggattgtgatcggcttgtttgctgccatgtttgctacgaacgcccagttccgtgccgcggtgatgcagcttgtggctgtggttggccaggcgttgggccagattatggccgctgtgcagccgctgtttggtctaattgctggtttggtggcacggttggctcccgtttttggccagattattggtttggttgccgggctagcggcgcagcttgtgcctgtgatcagtatgctggttgcccggctggttcctgttatcacgcagattattggtgcggtgacgcaggttgctgcaatgttgttgccggcgttgatgccggtgttgcaggctgttgtggctgtgatacgtcaggttgttggcgtggtcatgcagttggtgccggtgttgatgcctgtgattcagcagattttgggtgctgtcatgtctgttctgccgcctatcatcggcctgatccggtcgctgataccagtcatcatgtctgttatgcgtgtggcggttcaggttgtttcggttgtgttgcaggtggtggcccgtattcttgctgtggtggctccgatggtggctgctgtggtagggtttgttgcccgtattgttggtgctgtcgtgtcggctgttgcccgtgtgattgctgctgttgcccgtgtcatctcgtgggttgttgcccattttgtgtctggtttggcgcgtatgggttcggtggttcaggctggctggaatcatattagggcgtttacgtctgcgtttattaatggtttcaagtcggtgatttctggcggcgtgaacgcggttgtggggttttttgcccggctgggttcttcggttgcctcccatgtgaggtctggttttaacgcggctcgtggcgctgtttcggctgcgatgaacggtattcgtagtgtggtgtcttcggtggcgtctgctgttggctcgtttcttgggtcgatggcgtctagggttcgtggtgcagcctctagcgggtttaacggggcgaggggtgcggcttcttctgctatgcacgctatgggctcggctgtgtctagtggtgtgcatggtgtgctggggtttttccggaatcttcccagtaatattaggggcgctttgggtagtatggggtccctgttggtgtctgctggccgtgatgtggtggccggtttgggtaatggtattaagaatgctatgagtggcctgttggatacggtgcgtaatatgggttctcaggttgcgaatgcggcgaagtctgtgttgggtattcattccccgtctcgggtgtttcgtgatcaggttggccgtcaggttgttgccggtttggctgaggggatcaccggtaatgctggtttggcgttggatgcgatgtcgggtgtcgcttcgcagcttccggacgctgtggatgcccggtttggtgtgcgatcgtctgtgggctcgtttaccccgtacgtccggtatcggcgtgctcagggtgagagtgttgtggagaatgtgaatggcccgacgtatggtgatcctgccgagtttgcgaagcggattgagcggcagcagcgtgacgctttgaacgcgttggcttatatgtgagtaaaggggtatgcatgtttatccctgacccgtctgatcgttctggtttgactgtgacctggtctatggatccgctgtttggtggggagcgtgtgcttcatttgacggattatacgggtgcgtctccggtgatgttgttgaatgattcgttgcgcggtttgggtgttcctgaggtggagcatttttctcaaacacatgttggggtgcacggctcggagtggagtgggtttaatgtgaagccccgggaggtgacgctgccggtgttggtgtcgggtgtcggcccggatccggatggcgggtttcgtgacggtttcctgcaagcatacgatcagttgtggtctgcgtttcctcctggcgaggagggtgaactgtcggtgaagaccccgtctggtacagagcgtgtgttgaagtgtcggtttgattcggctgatgacacgtttacggtggatccggtgaatcgtggctatgcgcgctatctgttgcatttgacagcctatgacccgttttggtatggggatgagcagaagtttcgttttagtaacgcgaggttgcaggattggttgggtggcggccctgtcggcaaggatggcacggcgtttcctgtggtgttgacgcctggtgttggttcgggctgggataacctgtctaataagggtgatgttcctgcgtggcctgtgattcgtgttgagggtcctttggagtcgtggtctgtgcagattgatggtttgcgtgtgtcttcggattaccctgtcgaggagtttgattggatcactattgacacggatcctcgtaaacagtctgcattgttgaatgggtttgaggatgtgatggatcgtttgacagagtgggagtttgcccttatcccgcctggcggttctcggagtgtgaatattgagatggttggtttgggtgccattgttgtgtcggtgcagtacaggtttttgagggcttggtgaatagttgatggctggtcttgttccgcatgtaacattgtttacgccggattatcgccgggtggcgcctatcaatttttttgagtcgttgaagtagtcgttgaagtggaatggtttgtcgacgttggagttggtggtgtctggtgatcattctaggcttgacgggttgattaggccgggtgctcggctggttgttgattatggtggtggccagattttttctgggcctgtgcgtcgggtgcatggtgtgggtccttggcgttcttcgcgggtgactatcacgtgtgaggatgatattcgcctgttgtggcgtatgctgatgtggcctgtgaattatggtcctggtttggttggtatggagtggcgtgccgacagggattatgcccactattctggtgcggcggagtcggtggctaagcaggtgttgggggataatgcttggcgttttccgcctggtttgtttatgaccgatgatgagcgtcgtggacgctatattaaggattttcaggtgcggtttcacgtgtttgctgataagttgttgccggtgttgtcgtgggctcggatgactgtcacggtgaaccagtttgagaatgcgaagtttgatcagcgtggtttgctgtttgattgtgtgcctgctgtgacgcgtaagcatgtgttgactgccgagtcgggttcgattgtgtcgtgggagtatgtgcgtgacgcccctaaggctacttcggtggttgttggtggccgcggcgagggtcgggatcggctgttttgtgaggatgttgattcgatggccgaggatgagtggtttgatcgtgtcgaggtgtttaaggatgcccgtaacacggattctgagcatgtgcatctcattgatgaggcggagcgggtgttgtccgagtcgggggccacgtcggggtttaagatcgagttggctgagtcggatgtgttgcggtttgggccaggcaatctgatgccgggtgatttgatctatgtggatgtgggctcggggcctattgcggagattgttcggcagattgatgtggagtgtgtatcgcctggtgacgggtggacgaaggtgactcctattgcgggggattatgaggataatccgtcggccctgttggctcgccgtgtggctgatttggctgcgggtgtgcgggatttgcaaaaattttagaaaagaattgggggtttattgtgggtattgtgtgcaagggttttgatggtgtgttgaccgagtatgattgggctcaaatgtctggtctgatgggtaatatgccgtccgtgaagggcccggacgattttcgtgtgggcacgacggttcagggtgccacagtgttgtgttcggtcctgccggggcaggcttgggctcacggggtgatgtgcacgtcggatagtgttgagacggtgacagggcagctgcctggccctggcgagacccgatacgactatgtggtgttgtctcgggattgggagcagaatacggccaagttggagattgttcctggggggcgtgcggagcgtgccaggtatgtgttgcgtgcggagcctggcgtgtaccatcagcagttgttggctactttggtgttgtcgtctgacgggttgcagcagcagttggataggcgtgctgtggcggctcgtgtggcgtttggggagtctgcggcttgtgacccgacccccgtggagggtgaccgtgtgatggtgccttcgggggctgtgtgggctaaccatgccggcgagtggatgctgttgtccccgcggattgagacgggcactaagcagatccactttggcgggtctcctgtgtatgcttacacgatcccgtttgatcgccagttcagtgctccgcctgttgtggtggcgtctatggctacggcggctgggggtacgacacagattgatgtgaaagcctacaatattactaataaggattttcagttggcgtttattacgaatgacgggtctaagccgaatggtgtgcctgcggttgctaactggattgctgtcggcgtgtgaccgggctgttgttgtggcggatggtgtgatgttggggggctgtggtgtcgtggtttactcctgcactggtggcctctatttgtaccgcgttggccacggttttgggttctgttcaggcggtcacatcacgttctaggcggcgtttgcggcggctgtctgcgcaggtggatgcgatggaagaatacacgtggaatattcgccatattgttcaccgctataacgcgaatctgccggagaatgttgggccggtgaagatgcctgatttgcccgagtttttgaaggatactgttgatggtggtggggggtgaattgtgagggagttggaggaagaaaaaaggcagcgccgctcgtttgagaaggcttccctgatactgttgtttttgtcgcttgtgttgttggcggtggttgctggtggtgctttacgtttcggtgctgtggcttcccagcgggattcggagcaggctaaagcccagtctaatggtgcagccgccaaagggttggctgcccgtgtgaagcgggtgtgtgcctctggcgggcaggagtcggtgcggcttcaccagtctggtttgtgtgtggatgctcagcgtgttgagcagagtgtgcagggtgttcctggcccggctggtgtgcgtggcccgcaggggccgcaggggccggctggtgttgatggttcggctgggctggttggccctgttggtcctcagggttctccgggtgtgaatggtgtggctggcccgcaagggttgcctggcgctgacggcaaggatggtgttccgggtcgtgctggtgctgatggccgtgatggtgtgcctggtagggatggcgctgccggtgctgacggtgtgaatggcaaggatggtcctgccggtccccctggtgcagccggtgaacagggtgagcgtggccctgttgggcctcaggggccgcagggttctgccggtgccgatggcaaggacggtaaagatggtaaggatgggcgctcggtggtgtctgtgtactgttccgggggcctcctggttgtgaaatatagtgacggtacggcctctaccatagcgggttcggtggcctgccagggtgtgaaaccgtcaccggtggttaccgtatcatcccacaagtaaaagaggaagggtgttactagtgttgacagtagtgtttgggggtggcgtgttgtgagatacattcctgcagcgcatcactcggccggatcaaataagccggtgaaccgggttgtgattcacgcgacgtgcccggatgtggggtttccgtctgcttcccgtaaggggcgggcggtgtccacggcgaactatttcgcttccccatcgtcgggtggttcggcgcattatgtgtgtgatattggggaggcggtgcagtgcctgtccgagtctacgattgggtggcatgccccgcctaacccgcattctttgggtatagagatttgcgcggatgggggttcgcacgcctcgttccgggtgccagggcatgcttacactcgtgagcagtggcttgatcctcgtgtgtggcctgcggtggaacgtgccgctatcctgtgtcggcagttgtgtgacaagcatggtgttccgaaaaggaaactgtctgtggccgatctgaaagcgggtaggcggggcatctgcgggcacactgatgtgacggatgcgtggcatcagtcggatcatgacgatccggggccgtggtttccgtgggacaggtttaaggccgtcgtgaacggcggcagtggagagagtgaggagttaacggtggctgatgtgaaagccttgcatgatcagattaaacaattgtctgctcagcttactggttcggtgaataagctgcaccatgatgttggtgtggtgcaggtgcagaatggtgacttgggtaagcgtgtcgatgccttgtcgtgggtgaagaatccggtgaccgggaagctgtggcgcacaaaagacgctttgtggagtgtctggtattacgtgctggagtgtcgcagccgtatcgataggcttgagtcgactgttaacggtttgaaaaagtgatggtggtttgttgtgggtaaacagttttggttaggtttactggagcgggcggctaagacttttgtgcaaacgtttgttgctgtgttgggtgtgacggcgggtgtcacctatacggcggagtcgtttcgcggtttgccgtgggaatcggcgttgatcacagctacggtggctgcggtgctgtcggttgctacatcgtttggtagcccgtcgtttgtggcttgcaaacctaaaaccacgcctgtggatgcgggtttggttccaccggatgatgggggcttggttgagccgcacatggttgatgtgtcggatcctggcatgatcgagcctgtagatgatgcggatgttgccggctatgagcctcggcgtgcagccgagtctggggttgggacggtagggtctactgttgcataattgaatatgtgtgtgccccagcggtgctgccacgattgtgtggtggttgccgctggggcactatttttgtgtctatagtattctatgattcgttgttgttgatggtttcttcgatcagctggtccaggtggaggcaggcggagatcgtttcgctggcctggtgcagaacatcctggccgataacatttttgtggttgtcgcggtggcagatgattgactgcatgatatcgtcggcctccgcttgcagtagtttggtttggtatgcgattcctgccagccaatctatggcttcctggcttgcccgtgtgtcgtctggaatgccacgggtgttgctgttgtttgggtatcctgcactgtcgcagtcccacaggatctcgctgcactcgtctagcgtgtcctggtcgatagcaaggttgtcgaggctgacttcgttgacggtaaggttcacgttgtcgagggagatgggtacaccgtactggttttcgacaccgtcaacaatgttttccagctgttgcatgttggtgggctgttgttggacgatacggtgtatcgctgtgttgagggtggtgtaggtgatattgtgtgtgttgtccatggttttatcccatccctgtgctgtcgtcgttttcgtctggcatgtagtatgtgctgtttgcgtactcggttaacgtcatcagtgtttggtctgcccactgtttcgcggtttgtcttgtcacacccaatcgttgggctgccaccgaataggtttggtcatacccgtatacttcacggaacgctgccaacctagctagccgtttccgctgtttggatggctggcaggtgagggtgtagtcatcgatggccagttgtagatcgatcatggtgacaatgttgttgccgtgatgctggggggcggttggtggtggtggcatgcctggctcgacactgggtttccatggtccgccgttccagatccattgggcggcttggatgatgtcggcggtggtgtaggttcggctcactggtcatcccctgaataggttgtcgaggttgtctgggttgctggtgttggtggtgtcgaatcgtcccacgcagtggcagtagtcgtacatgagtttgataatgtgttggtggtctcccaaataggtgtttccgctgatgctgtaggtggctgtgccgtctttactgatggtgtatttggcggtgatggtttcgggtgtttctgtgttggtgatgatggctgtggtggtggtgcctactgtttgtagcctggtggtttgggtgccgtcgtcgaggatggtagtaaccatgagggttgtcctttagttgctggtttggttgtcggctagatgaatgatatcgggtaaaggtttcggctggtctaaatgttgtgtggttttgttggctagccgtttggctaccctgtagcacattttggtgtagtgtttgttgtctaggttgtggtattgttcccgcaccgcaatatatagtagggagtcttggtagaggtcgtctgcactggttgcggggtagtgtgcggctgttttggtgcatgcccggttgagtgtgcggagatgatggtctgtggcccaaacccacgatgcggtggtggccaggtctgctttggttggtcgtcggctcatggcatctctttcatcgggctatctggtagttgtttggtgttttgttgttgatagtgtagcacactagtccggggtttccggtggtgccagtctggtgccggaaccatgtggattcgccttccatggatgggcattggatgaaggtgcgttgtccttgctcggagatttctaggtggtgccggtgccctgccatgagtatatgggatgtggtgccgttgtggaattcttggccgcgccaccaatcatagtgtttgccggtgcgccattggtgtccgtgggcgtgcaggatttgtgtgccggccacatcaacggtggtggtcatttcgtctcggctggggaagtggaagtgaaggtgggggtattggttgttgagctggtaggcttctgcgatggcgcggcagcagtccacgtcgaaggagtcgtcgtaggtggtgacgcctttgccgaagcgtacggcttcaccgtggttgccggggatggatgtgatggtgacgttttggcagtggtcgaattggtggatgagttgcatcatggccatgcgggtgagcctgatttgttccgtcaggggtgtttgtgtgcgccaggcgttgttgcctccttgtgacacgtatccttcgatcatgtcgcctaggaatgcgatgtggactcgttgcggtttaccggcttgttgccagtagtgttttgcggctgtgagggagtgtaggtagtcgtcggcgaagtgtgctgtttccccgccggggatgcctttgccgatttggaagtctcctgccccgatgacgagggccgcagtgctgtagtcggtgtgggtgtcttgtttgggttttgggggtgtccattcggctagtttatcgacgagttcgtcgaccgggtagggatcggttgcgggttggtggtcgatgattttttgtatggatcggcctgtttctccgttcggtaaggtccattcggagatgcgtgtgcggcgtacggtgccgttggctagattgtcgtcgatggtgtcgatggcgttgtcgtggttggctagctgtgtgaggagtcggtctatattgtctatcactggttttcctcttcttttttctgtgtggtgttggcttgtttgcggcgatagtcttttataacggtggcggagatggggtatcctgcctgggtgggctgttttgctagccacgaggcggggatggttttgtcggcgagcacgtcggcagctttgttgccgtagcgttgaataagggtttcagttttggttgccatgatgtcctatcggttgtgtggtgggctgccagcctgtgcggcagtcgccgtcgtgtcctggtttgcgtgtgcaccatgagacttcgccggcattgtggatgatggcacggccgcatgtgacgtcatgtaggtgttcgggaaacttatcgttgttgttgtccccgtacatgtcgatcacgtgttgggttttagtagccatcatgtctcctgtgtgtgaaagagtgtgcaaatactatgctggtgtcatggatgtttatgcgggtatggttttcatcaccttgctgaacgttacttggttactgtacatcatctgggtgatttcctgatccgttttgtcggggtgctgttttcgcaggtttgcccattggcaggcgttgtaggtttcgtcttggagtcgtgtgagatggttttcgttgatgatgtgtttccacatggtccatgacacgtcgagccggttg

SEQ ID NO: 84 - DNA, 16463 bp, Pahexavirus sp.
  source 1..16463: mol_type = genomic DNA
caggtggaggtcgtattgttcggtgatgtggtgtatagcactgccggcgatggtggcgtaccaggtgtggtgttgtgcatggtagccgtgggataggcgccatttttctccgcattcggcccactgggacagggaactgtaggagatgtggcctgggtggctgatggttttcggatattgtgctagaggcattacttgtcgcttttgttccatgggttgcgggtgtcttggccggcctggtgttgctggtaggcaaggagtgcgaggcagtgccaggcggcttgggctagatgcggtagcccggattcgtggtcgaggttgttgccttgctgccatgatagtaggtgccggtagagggcgtcgacgctgtggctccacgggtatcctccggtccagttgttgtcgccgtatttggtggcgccgtagcctgccacggagcctagatcgtgcaaggctgcggggtcgatgagggagagcctgcagagtttcaattcttttcgggctccggtgttggggtcggtgtacatgcgggttggctcatccatggggtgtgtgctccttaagcgttggttactggttgttgttgtgggctagggctacggcgagaataatgatggcgagggtttcagcaataggtatgggtgttgtgatcatttggtgttgtggggattgtaggtgagggttgatgcacctagaagcgatgcgagggcgcatgcggcgatgatggcgagggcggctttgtggctggtgccggtggcgtacatccatgtgatgatggcgccttggatccaggcgaggctggtgaagaatgtttcgtaactgtgcaactcaatgttgttgggtgtgttcatgcttgctcctgaagaatggtgttgatggttttataaatgttgtacaggtcggtttcaatagataacagttggtggatttcgtgatcgagatcaatgtccgggttgagagtgttgatgcgggaggcaatatcggtggctgtgcgtagtgtgccgccggtgtggtgaataatgtgtgccgtgtcggcgagtccggtggtgacagcatagtgggagaggagaggcatagcggtccttggcgggttagtgttgcgggttgatgttgaggtcggtgacgtggggtgtgttttctgttccggtgacgaggcagtgaacagtgacagggagtttggatgctcccggctggcggacggtggcgccgtagacgatggagaaggtgtctttaccgatggttctgtggagttggaggtcgatgtcggggttgccgttccatttgacgccttgggcggcggcctgctgttcggctttacggtcgcaggtgtgggctgcggtgatcatggtgagaccctgcgctgtttcttctccgcgctgctgtgcttgctggtgtacctttttttgttcggcttgtagggagcggggggcggctgcctgccgtgccgctttctcggctttgcgctgctggacggtttcaggtgtccattcggtgttggctgtggtggcttgtggtgcgggctgtgaggcgagtggcggattgtcgtcgggtgctggcatgaatgaggctgcggcgatgatggcggctgtgatgcctgcgatggtgtagccttttttcttgttcatgactgttgtcccctttccggggtgttgttcgttgctgacatgattaatcatggtgtgggcggttcctcatgtcaaggctgcgctcaacgattgtgagcgtttggtgtgtggctaggggttttatcgggcacacagggttagcaggtggccaatattgatgcgggtcacgttccagtagagttgtgtggcttctccgccggtgagtggcttccactcgttgtggctgaacacggtgccgtcggtggcgatgaatgtgttggggcgtagcttgtggagttcggcttccacgctttgccggtaggcttcggcgaggccctcgaaatccatgtggtcgcaggagaggttttcgaggcgtgtcaggtcgaagggtgtggggcagtcgtagctggcgggggtatagagctgggtgaagtggtcggccatcttctgcatgacgggttccttttctcgtgtggtgggttgatggtttttatcgtgtggcttcggcgatgatggcatccatgtcgatcatgtcgatcatgtcgtggaggtcttcagcttcgttctcggtgagtggctgccagtcctggggtccgtatacggcgccgtcgagggtgacagtccacaggggccgtatgagccggatggcttcctcgactttggcacggtataggcggcagatgatagacggatgggtgttgcctatgtcacacccggtgaggtgtgcggggtggaatgggttgatttcggtttgagtgtacagggttgtgaaggatgttgtgacgagtgttccatccatgagggtgtgctcctttctgcggggttgttgtggtttctagggtgtggagggttgcgacctagagtcaaggctgcgctcaacgattgtgagcgattcgtgggggtgtggtgtatgccaccgatgctctcatggctcctgtaggcgtctcaaatccttgaggggtgggattatgaaggatcagccatgctcgtcgattctagggcccttctagggcgtctcaggggtatgtctgggtggcagcaggttcggtagatgacccggtagatctaccttggctttcatgacggaggtcgaggtgccatatctgggcacggaatccacacccccataccgtgtgagataggccacatcctcctggcttggtgtacaccctcaaggccactctgccgatctagcgtgaagggtgtagcccagaaataccgtttaaagcttcaggggtacgcctaggagcgccttacagggtgggggctaagtattcataccccaagcatattctgatcgattctagacgcctcccagagcctgatacacgatcaaccatccagacgcagatcaccagcccccatcctgcttagctaagcctcaactatgtggacagtgtgggatgctaagggggaagaaggacacggtccaagaaagaagggggagcatcagccttcacaccttcaagccttaaggtcttagcagttagcaccgagcccctcaagggctcggcatcagcccgaacaggcacagccctgaaaggggtacacgccatcagggaaggcttgagagtacgaggagctttagcgacgagtactcgaaagcctgagggaagaccatcagcactgatgggcctagcgtgttcggaaaggacacaagagtaaagtgtgacagctgtccgggagtgaaacccgttctgactaggggtttcagccttaacaaccctcaaaggttacaagactctaagaaaatttaaggaaaagtttaggtttaatttttggacctttactaccaaaaacacccgtttacacccctcgaacccgcctatagagccaaatccaccagtttgactcatcccaggtggggtatgataggctggacaggtagccagctggacgcaaggccgaaatccgctgacgcggctttcacccttacatccatctgtctaccaaacacttaaaagcttcaaggcttagcgctaaggtgctgatagcttagcaccgagcccctcacgggctcggcatcagcctgacagtcttatacacttaaagtacatataaaactttaaaagcttaacacttaataatttaagtaaacattaaagctttaaagtcttaaagtaaatatataaccttaacacctaagttaagtataaaaccttaaaggcttagcacttaaggatataaacttaacatcagtgtttaagacttaaaggcttataaactttaatactttaagtaactataagactttaaaaaccttaagtacttaaagttaaccatcagtcttaaactttaatattataacctataagtcttaaagcttataggttataaaagttttagaagagctaaggggttaacttctttacttctcttctctctttggtactttctctcttctcttcttttcttcatcaggggagaagaggaacctttaaccgtcaacgctgatggactttcaaccgtgtgtctcgtgtaccaccggtcgcacgctcccggtttgtacactccccacattctcacaccccgtgcccctttacggcatagcgtgttcggctgaaggcgtacggcgtgtcacgccaacacccttaacactgggtaagatttaaagtgtatattatatgtagaagactttaaaaacctgtcaggtgttcctgcttagcctgtgtcctttaacgctgggcgctaggcggtaagctgtgaaacgcgaacacccaccccccttttttcttccgtgtccttgtcttttgacacagctggggggcgatgtgatctttttcacacccctgggggtagtggaaaaaacaaccaccccgacacaaacagaacaccccctcaaacgaacaaaacagcccccagaatcgatcagcagggcatcggtagggtattcatacccccagacgattccaggccgttagaggggcaaataagaccagtacagggctaggcgaggaacagacacatcatggcacgcaccaaccgcacagccagccaagcccaccgacgctggcgggcaagactcatcacccaagcacgcaagcaaggccaaaccgaatgcccactctgcggagcccagatagcctgggacacacatgacctgccaaccagccccgaagccgaccacatcacacccgtcagccggggaggactcaacaccctcgacaacgggcaaatcatctgcagaacatgcaacagaagcaaaggcaatcgcagcgaaccaaacattagtttccaacaacaaaccacaaaaaaccttgtttcatggtgaaaaacccgccaacccccgacggggacaccccctgcacacccgtgcaagacctcgtacggcttagtgaaatacctcccttttgtggatttgtctgtttgtcgactttttgtgttggtggtgggtgttgtgcagcctgagcttcctgggtctcgtgagaggtgtggggagacgcgtcgttggtggcgtgtgtggggtgaggatagccgtgcgtcgtacgtgtctgatgaggagtggctgtttctcatggatgctgcggtgattcatgattgtgtgtggcgtgagggtcgcgcggaccttgtggcttctttgcgtgctcatgtgaaggcgtttatgggcatgttggaggctcattctggggatgctggcactaccagcggtggtgctggttctgcggtggcgatgattgatcggtataggaagcgtaaaggggcttaatgtctggtgttgtgggttctcaggttcctcgtcaccgggtggctgcggcgtattcggtgtctgctggcaaggatgctggtgctttgggggctgcgtatgggttgactccggatccgtggcagcagcaggtgttggatgattggcttgcggtgggtgcagggggtcgtcttgcttcgggtgtgtgtggggtgtttgtgcctcgccagaatggcaagaatgctattttggagattgtggagttgtttaaggcgactattcagggtcgccggatttcgcatactgctcacgagttgaagtcggctcgtaaggcgtttatgcggttgaggtcgttttttgagaacgagcggcagtttcctgacctgtttcgtatggtgaagtcgattcgggcgacgaatggtcaggaggctattgtgttgcatcatccggattgtgccacgtttgagcgtaagtgtggttgtccgggttggggttcggttgagtttgtggcccgttctcggggttctgctcgcgggtttacggttgatgatttggtgtgtgatgaggctcaggagttgtcggatgagcagttggaggctttgcttcctacggtatctgcggctccttcgggtgatccgcagcagatttttcatggtaccccgccggggccgttggcggacggtagcgtggtgttgcgtcttcgcgggcaggctttgtcgggtggtaaaaggattgcgtggacggagttttcgattcctgacgagtctaacccggacgatttagctcgacaatggcggaaattggctgggaatactaatccagccttgggtcgccgcctgaattttgggacagtctcggatgagcatgagtcgatgtctgctgccgggtttgctcgggagcggcttggctggtgggatcgtggccagtctgctgcgtctgtggttcctgctgataagtgggctcagtctgcggtggatgaggcgagtctggttggcgggaaagtgtttggtgtctcgttttctcgttctggggatcgggttgctttggcgggtgccggccggactgatgctggggttcatgttgaggttattgatgggctgtcgggaacgattgttgatggtgtgggccggttggctgactggttggcggttcgttggggtgatactgaccggattatggttgccgggtctggtgcggtgttgttgcagaaggcgttgacggatcgtggtattccgggccgtggcgtgattgtggctgatactggtgtgtatgtggaggcttgtcaggcgtttttggaggctattcgttccgggaatgtttctcatcctcgtgttgattctcgccgtgacatgttggagattgctgtgaggtcggcggttcagaagcgtaagggttcagcttggggctggggttccacgtttaaggatggttctgaggttcctttggaggctgtgtcgctggcgtatcttggtgcgaaaacagttaaagtgaagcggcgtgaacggtctggtaggaagcgggtgtctgtggtatgaatatggacgagttggctctgattgagggcatgtttgatcggattcaaaggttgtcttcgtggcattgccgtattgagggctactatgagggttcgaatcgggtgcgtgatttgggggtggccattcctccggagttgcagcgtgtgcagactgtggtgtcgtggcctggtatagctgtggatgctttggaggagcgtctggattggcttggctggacgaatggtgacggctacggtttggatggcgtgtatgctgcgaatcggcttgctacggctccgtgtgatgtgcatttggatgcgctgatttttggtttgtcgtttgtggctgttatcccccaggatgatggtactgtactggttcgtcctcagtctccgaagaattgcacgggccggttttcggctgatggttctcgtctggatgctggccttgtggtgcagcagacgtgtgatcctgatgttgttgaggctgagttgttgcttcctgatgtgattgttcaggtggagcggcggggtagccgtgagtgggttgagacgggtcgtataccgaatgtgttgggtgcggttccgttggtgcctgttgtgaatcgtcgcaggacgtctaggattgatggccgttcggagattacccgctcgatcagggcttacactgatgaagcggttaggactttgcttggtcagtctgtgaatcgtgacttctatgcctatcctcagcgttgggttacgggtgtgtcggctgacgagttttcgcagcctggctgggtcctgtcgatggcttctgtgtgggctgtggataaggatgatgatggggacactccgaatgtggggtcgtttccggttaattctccgactccgtattcggatcagatgcgcttgttggcgcagttgactgcgggtgaggctgctgttccggagcgctatttcgggtttattacgtctaatccgccttcgggtgaggctttggctgctgaggagtcgcggcttgtgaagcgggctgagcggcgtcagacgtcgtttggtcagggctggttgtcggttggtttcctggctgcgagggcgttggatgctcgtgttgatgaggctgcgttttttggcgatgtgggtttgcggtggcgtgatgcttcgacgcctaccagggccgctacggctgatgctgtgacgaagcttgttggtgccggtattttgcctgctgattctcgtacggtgttggagatgttggggcttgatgatgtgcaggttgaggctgtgatgcgtcatcgtgctgagtcgtctgatccgttggcggcactggctggggctatatcgcgtcaaactaacgaggtttgataggcgatggcttcgggggctatgtcgaggcttgctgcgactgagtatcagcggcaggcgattcgttttgccgggaaatacgctgggtattatgccgagttgggtcgtttgtggcattccgggaagatgagtgacacgcagtatgtgcgtttgtgtgtggagttggagcgtgccggccatgatggctccgcagctatggcgggcgagttcgtgtccgattttcggaagcttaatggtgtcgatcctggtttgatcgtgtatgacgagtttgatgctgccgccgcgttggctaggtcgttttcgactatgaagatgatgaatagtgacccggatagggtgaatgatacgattgatgctatggctgcgggtgtgaatcgggctgtcatgaatgctggccgtgacacggttgagtggtctgctggtgcgcagggcaggtcttggcgtcgggtgacggatggtgatccgtgtgctttttgtgccatgttggctacgaggtcggattatacgactaaggaaagggcgctcacgactggtcatactcggcgtcataagcgtggtggtaagcgtccgtttggttcgaagtatcatgatcattgtggttgtacggtggttgaggttgttgggcgttgggagccgaatagggctgatgccgcatatcagaggacgtatgagaaggctcgtgagtgggttgatgatcatgggttgcagcagtcgcctggcaatattttgaaggctatgcgtactgttggcgatatgcgatgaatggtttccggttgtgcatcgccggttatcggtgtacgggttgtctcccgcacggggggcggcaagaatggtattgttttccgcaaggagtgtaaggttaggctatggccgatcagagtgttgaggaacagaatgtcgacaatgatgttgttgagcccggaaggggtggagacattgttgatgttgtgaaggatgatcaaagcgggcaggcaggcgatcagtcgaagcatgatggtgtagataagccgtctggcacggattggaaggctgaggctcgtaagtgggagtctcgtgctaaaagtaattttgcggagttggagaagtttcgcgcctcggatggtgatgcggggtctgtgattgatgatcttcgccgcaagaatgaggagctcgagggtcgtgttaacgagtttgttcttgagggtgtgaagcgtgatgtggctgccgagtgtggcctatcagctgatgctgtagcttttttgcacggtagtgatcgtgaggctttggtggagtctgctaaggctttgaagggcttgattgaccatagtggcggtgcgggtgtgcgccgtcttgcggggagtgcccccgtggatgatgttaaacgacgtgagggtgtcgcttttgttgatgctcttgtcaataactctaggagatgatctgtgatggctgatgattttctttctgcagggaagcttgagcttcctggttctaggattggtgcggttcgtgatcgtgctatcgattctggtgttcttgctaagctgtcgcctgagcagctgactatttttggtcctgtgaagggtgctgttttcagtggtgttcctcgcgccaagattgttggtgagggcgaggttaagccttccgctagcgttgatgtttctgcgtttactgcgcagcctatcaaggttgtgactcagcagcgtgtctcggacgagtttatgtgggctgatgctgattaccgtctgggtgtgcttcaggatctgatttcgcctgccctgggtgcttcgattggtcgcgccgtggatctgattgctttccacggtattgatcctgccactgggaagcctgctgcggctgtcaaggtgtcgctggataagacgaataagacggttgatgccaccgattccgctacggctgatcttgttaaggctgtcggtctgattgctggtgctggtttgcaggttcctaacggtgttgctttggatccggcgttttcgtttgctctgtctactgaggtgtatccgaaggggtctccgcttgcgggtcagccgatgtatcctgccgccgggttcgctggcctggataattggcgtggcctgaatgttggtgcttcttcgactgtttcgggtgccccggagatgtcgcctgcctctggtgttaaggctattgttggtgatttctcgcgtgttcattggggtttccagcgcaatttcccgttcgagctgatcgagtatggtgatccggatcagactgggcgtgacctgaagggccataatgaggttatggttcgtgccgaggctgtcctgtatgtggctatcgagtctctggattcgtttgctatcgtgaaggagaaggctgcaccgaagcctaatcctccggccggtaactgattcatttgttgcggtgatgttttctatgtgcagggggtggtgttgatgggtatcattttgaagcctgaggatattgagcctttcgccgatattcctagagagaagcttgaggcgatgattgccgatgtggaggctgtggctgtcagtgtcgccccctgtatcgctaaaccggatttcacatacaagaatgccgctaaggctattctgcgtagggctttgctgcgctggaatgatactggcgtgtcgggtcaggtgcagtatgagtctgcgggtcctttcgcccagacgacacggtctaatactcccactaatttgttgtggccttctgagattgctgcgttgaagaagttgtgtgagggtgatggtggggctggtaaagcgttcactattacaccgaccatgaggagtagtgtgaatcattctgaggtgtgttccacggtgtggggtgagggttgctcgtgcgggtcgaatattaacggctacgctggccctttgtgggagatatgatatgaccagttttccttacggtgaaatggttgcgatgcttcagccgactgttcgtgtcgatgatcttggtgacaaggttgaggattgggggcatcctgtagaaaccgtgtaccataacgtggccatctatgcttccgtttcacaggaggatgaggccgcggggcgtgactctgactatgagcattggtcgatgcttttcaagcagtctgttgtgggtgctgattatcgttgccggtggcgtattcggggtgttgtgtgggaggctgacgggtctcctatcgtgtggcatcaccccatgtccggttgggatgctggtacgcagatcaatgtgaagcgtaagaagggctgatgggttgtggctcaggatgtgaatgtgaagctgaacttgtcgggtattcgtgaggtgttgaagtcttctggggtgcaggctatgttggctgagcgtggtgagcgtgtcaagcgtgcggcctcggcgaatgtgggcggtaatgctttcgataaggcccaataccgtaatggtttgtcgtcggaggtgcaggttcaccgggttgaggctgtggcgaggattggtaccacctataggggtgggaagcgtattgaggcgaagcatggcacgctggctcgttcgattggggctgcgccgtgatcgtttacggtgacccaagagtctgggctaaacgcgtgctcaaggatgatggctggctgtccgatataccgtgtactgggacggtgcctgaccagtttgagggtgaccttatttggttggctcttgatggtggcccgcagttgcatgttcgtgagcgagtgtttttgcgggtgaacgtgttttctgatacgcctgatcgggctatgtctttggcgcgtcgtgttgaggctgttctggctgacggtgtggacggtgaccctgtggtgtactgtaaacggtctactggccctgatttgctggttgatggtgcacgttttgatgtgtattcgctgtttgagctggtgtgtcggcctgtagagtctgagtaaacgtatttgtttattgttttagttttattgtttttgttgattgttttttgggggttgtgatggctgctacacgtacggcgtctaatgttcgctctgctgttacgggtgacgtctatattggtaaagctcatgccggtgacactattgatggtgtgaagacggttcctgacggtcttaccgctttagggtatttgtcggatgacgggtttaaaattaagcctgagcgtaaaacggatgatttgaaggcttggcagaatgcggatgttgttcgcactgtggctaccgagtcgtctatcgagatttctttccagctgatcgaatcgaagaaagaggtcatcgagctgttttggcagtcgaaggttactgccggagccgattcgggttcgttcgatatttcaccaggcgccactacgggtgttcacgccctgttgatggacattattgatggcgatcaggttattcgctactatttccctgaggttgagcttatcgatcgtgacgagattaagggtaagaatggcgaagtgtacgggtatggtgtgacgttgaaggcgtatcctgcccagattaataagaagggtgatgcggtgtctggtcgggggtggatgacggctttaaaagctgatactcctccgacgcctcctccttcgccgaagccggatcctaatccgtcggctgagaactgatacacgagtttaagggattgttgatagatgagtgacacaggttacacgttgaagattggcgaccgtagctgggtgtaggcggatgcggaggagacggctcaggctgttcctgcccgcgtttttcgccgtgcagctaagattgcccagtcgggggagtctgcggatttcgctcaggttgaggtgatgttttctatgttggaggctgccgccccagaggatgctgtggaggccttggaggggcttcctatggttcgtgtggccgagattttccgtgagtggatggaatataagcctgaaggtaagggtgcctcgctgggggaatagcttggctccacggcctgattgatgattatcgtggggccatcgaatacgatttccgcaccaagtttggtgtttctgtttatagtgttggtggcccgcagatgtgttggggtgaggctgtccggctggctggcgtgttgtgtaccgatacgtctagccagttggcggcccacctgaatggttggcagcgcccgtttgagtggtgcgagtgggctgtgttggacatgctggatcattacaggtctgctaatagtgaggggccgccggagcctgtggcgaggcctacggatgagcgtagggcccggtttacgtctgggcaggtggacgatattttggcgcgtgttcgtgcctgtggcggggtgtctcgcgagattaatgttatggggtgaatagtgtatgtctggtgagattgcttccgcatatgtgtcgttgtatacgaagatgcctggtttgaaggctgatgttggtaaacatctttctggggttatgcctgctgagggtcagcgttcgggtagtttgtttgctaagggtatgaagttggctttgggtagcgccgcaatggtgggtgccatcaatgttgccaagaagggcctcaagtctatctatgatgtgactattggtggcggtatagctagggctatggctatcgatgaggctcaggctaaactgactggtttgggtcacacgtcgtctggtacgtcttcgattatgaattcggctattgaggctgtgactggtacgtcgtatgcgttgggtgatgcggcttctactgcggcggcgttgtctgcttctggtgtcaagtctggcgggcagatgacggatgtgttgaagactgtcgcggatgtgtcttatatttcgggtaagtcgtttcaggatacgggcgctatttttacgtctgtgatggctcgcggtaagttgcagggcgatgacatgttgcagcttgcgatggcgggtgttcctgtgctgtctctgttggctaggcagacgggtaaaacgtctgctgaggtgtcgcagatggtgtcgaaggggcaaatcgattttgccacgtttgcggctgcgatgaagcttggtatgggtggtgctgcgcaggcgtctggtcagacgtttgagggcgctatgaagaatgttaagggcgctttgggctacctgggtgcgacggctatggcgccgtttcttaacggcctgcggcagatttttgtcgcgttgaatccggttatcaagtctatcacggagtctgtgaagcctttgtttgcgtcggtggatcaggggattcagcggatgatgccgtctattttggcgtggattaaccgtatgccggctatgatcacaagaatgaatgcacagatgcgcgctaaggtggagcagttgaagggcatttttgcgagaatgcatttgcctgtccctaaagtgaacttgggtgccatgtttgctggcggcaccgcagtgtttggtattgttgctgcgggtgtcgggaagcttgttgcagggtttgccccgttggcggtttcgttgaagaatctgttgccgtcgtttggtgctttgaagggtgccgccggggggcttggcggcgtgttccgcgccctgggtggccctgtcggtattgtgatcgggctgtttgctgccatgtttgctacgaacgcccagttccgtgccgcggtgatgcagcttgtggctgtggttggccaggctttggggcagattatggccgccttgcagcctgtgtttggtctaattgctggtttggtggcacggttggctcccgtttttggccagattatcggcatggtggccgggttggctgcccagttgatgcctgtgatcggtatgctggtggcccggctggttcctgtgatcacgcagattattggtgcggtgacgcaggttgctgccatgttgttgccggcgttgatgccggtgttgcaggctgttgttgctgtgatacggcaggttgttggcgtgatcatgcagttggtgccggttttgatgcctgtgattcagcagattttgggtgcggtcatgtctgttctgccgcctatcatcggccttatccggtcgctgataccagtcatcatgtctgttatgcgtgtggtgatgcaggttgttggtgtcgtgctacaggtggtggcccgcattattccggttgtgatgccgattgtgacagctgtgatcgggtttgttgcacgtattcttggcgctattgtgtctgctgaagcccgcattattgggactgtcgcccgtgtcatctcatgggttgtgaatcatttagtgtctggcgtgaggtctatgggcacggccatcttgaatggctggaatcatattagagcgtttacgtcagcgtttattaacggtttcaagtcgatcatttctggcggcgtgaacgcggttgtcgggttttttgcccggcttggttcttcggttgccgcccatgtgaggtctggttttaacgcggctcgtggcgctgtttcttctgcgatgaatgctattcggagtgttgtgtcttcggtggcatctgctgttggcgggtttttcagttcgatggcgtctagggttcgtagtggtgctgtgcgcgggtttaatggcgcccggagtgctgcttcttctgctatgcatgctatggggtccgctgtgtctaacggtgtgcatggtgtgctagggtttttccggaatctgcctggcaatattcggcatgctctcggtaatatggggtccctgttggtgtctgctggccgtgatgtggtgtctggtttgggtaatggtatccggaatgctatgagtggcctactgggtacggtgcgtaacatgggttctcaggttgctaatgcggcgaagtcggtgttgggtattcattccccgtctcgggtgtttcgtgaccaggttggccgtcaggttgttgctggtttggctgagggtattactggcaatgctggtttggcgttggatgcgatatcgggtgtggctggtcggctgccggatgctgtggatgcccggtttggtgtgcgatcgtctgtgggctcgtttacaccgtatggcaggtatcagcgcatgaatgataagagtgttgtggtgaatgttaacgggccaacctatggggatcctaacgagtttgcgaagcggattgagcggcagcagcgtgacgcgttgaacgcgttggcttacgtgtgattgcggggtgtggttcatgtttattcctaacccgtctgatcgtgccggtttgacggtggattggacgatgtttccgttgattggtaataatccggagcgtgttcttcatttgacggattatacgggtgcgcccccggtcatgttgttgaatgattcgttgcgcggcctgggtgttcccgaggttgagcatttttctcaaactcatgttggggtgcactgctattagtggcgtgggtttcatgtgaagcacgtggagttttc

SEQ ID NO: 85 - DNA, 8764 bp, Pahexavirus sp.
  source 1..8764: mol_type = genomic DNA
caagaacccgacacgaagcccgcccgccggatcctcgtcgacacccgacaccgacaccggcaaagtcacctcgcgaggcttcacattaaacccgcgccactccgaaccatgcacacccacatgcgtttgagaaaactgctccacctcaggcatacccaagccgcgcaacgaatcattcaacaacatgacaggagacgcacccgtataatccgtcaaatgaagcacacgctcgtcgccaaacagcggatccataaaccatgtcacagtcaaacccgaacgatcagacgggtcaggaataaacatgcatacccctttactcacatgtaggccaacacgttcaaagcgtcacgctgctgccgctcaatccgcttcgcaaactcgttaggatcaccatacgtgggcccgttaacattcaccacaacactcttctcactcgcacgccgataccggtcatacggggtaaacgagcccacagacgatcgcacaccaaaccgggcatccaccacatcaggcagccgaccagccacaccagacatcgcatccaacgccaaacccgcattaccagtaataccctcagccaaaccggcaacaacctgacggccaacctcgtcacgaaacacccgagacggggaatgaatacccaaagcagacttcgcagcacccgcaatctgggaacccatgttacgcaccgtatccaacaggccactcaaagcattccggataccgttacccaaaccggccaccacatcacggccagcagacaccaacaaagaccccatgttacccaaggcgcccctaatattgctgggcaaattccggaaaaaccctaacacactattcacaccactagacacagccgagcccatagcatgcatagcagaagaagccgcacccctcgcagcgttaaaccctgacgaggcagcaccacgaaccctagacgccatcgaactgaaaaacccgccaacagcagacgccaccgaagacaccacactccggatagcattcatcgcagaagaaacagcaccacgagccgcgttaaaaccagacctcacatgggcggcaaccgaagaacccagccgggcaaaaaaccccacaaccgcgttcacgccgccagaaatcaccgacttgaaaccattaataaacgcagatgtaaacgccctaatatgattccagccagcctgaaccaccgaacccatacgcgccaaaccagacacaaaatgggccacaagccacccgatgacacgggcaacagcggcaataacacgggccacagcagacacgacagcaccaacaatacgggcaacaaacccgaccacggccgccgccataggagccacaacagcaagaatacgggccaccacctgtatcacaaccgcaacaacctgaaccaccacacgcataacagacatgatcaccggtatcaacgaccggataaggccaataatcggtggcagcacagacatgacagcacccaaaatctgttgaatcacaggcatcaaaacaggcaccaactgcatgatcacaccaacaacctgccgtatcacagcaacaacagcctgcaacaccggcatcaacgtaggcagcaacatggcagcaacctgcgtcaccataccaataatctgcgtgatcacaggcaccagccgggccaccaacataccgatcacaggcatcaactgggcagccaaaccggcaaccataccaataatctggccgaacactggagccaacctggcaaccagcccggcaacaatcccgaacacaggctgcaaggcggccataatctgccccaaagcctggccaaccacggtcacaagctgcatcaccgcggcacggaactgggcgttcgtagcaaacatggcagcaaacagcccgatcacaataccgacagggccacccagggcgcggaacacgccgccaagccccccggcggcacccttcaaagcaccaaacgacggcaacagattcttcaacgaaaccgccaacggggcaaaccctgcaacaagcttccccacaccggcagccacaataccaaacactgcggtgccgccagcaaacatggcagccaaattcactttagggacaggcaaatgcagcctcgcaaaaatgcccttcaactgctccaccttggcgcgcatctgtgcattcattctcgtgatcatagccggcatccggttaatccacgccaaaatagacggcatcatccgctgaatcccctgatccaccgacgcaaacaaaggcttcacagaatccgtcaccgacttgatcaccggattcaacgcaacaaaaatctgccgcaacccattcaaaaacggcgccatagccgtagcacccaaataacccagggcacccttaacattcttcatagcgccctcaaacgtcttaccagacgcctgagcagcaccacccatgccaagcttcatcgcagccgcaaacgtggcaaaatcaatctgccccttcgacaccatctgcgacacctcagccgaggttttacccgtctgcctggcaagcaaagacagtacaggaacacccgccatcgtaagctgcaacatgtcatcgccctgcaacttaccgcgagccatcacagacgtaaaaatagcgcccgtatcctgaaacgacttacccgaaatataagacacatccgcgacagtcttcaacacatccgtcatctgcccgccagacttcacacccgaagcagacaacgccgcagccgtagacaccgcatcacccaacgcatacgacgtaccagtcacagcctcaatagccgaattcataatcgaagacgtgtcagacgacgtgtgacccaaaccagtcagtttagcctgagcctcatcgatagccatagcgcgagcaataccgccaccaatagtcacatcatagatagacttcaaacccttcttggcaacattgatggcacccaccattgcggcgccaccaagcgccaacttcatgcccttagcaaacaagctacccgaacgctgaccctcagcaggcatcaccccagacaactgtttaccaacatccgccttcaaaccgggcatcttcgtatacaacgacacatatgcggaagcaatctcaccagacatacactattcaccccataatactaatctcgcgagacaccccgccaccggcacgaacacgcgccaaaatatcgtccacctgcccagacgtaaaccgggccctacgttcatccgtaggcctcgccacaggctccggctgcccctcactattagcagacctgtaatgatccagcatgtccaacacagcccactcgcaccactcaaacgggcgctgccaaccattcaggtgggccgccaactggctagacgtatcggtacacaacacgccagccagccggacagcctcaccccaacacattatcgggccaccaacatcataaacagagcaaccgaaccgggtcctccaatcatattcgatggccccacgataatcatcaatcaggccgtggagccaaattattcccccagcgaggcacccttaccgtcaggcttgtattccatccactggcggaaaatctcggcaacacgaaccataggaagcccctccaaggcctccacagcatcctctggggcggcagcctccaacatggaaaacatcacctcaacctgggcgaaatccgcagactcccccgactgggcaatcctggctgcacggcgaaaaacgcgggcaggaacagcctgcgccgtctcctccgcatccgccaacacccagctacggtcaccaatcttcaaggtgtaacctgagtcactcatctatcaacaatccctcaaactatgtgtatcagttatcagacggcggattaggatccggctcaggcttcggaggcttcggggctggaggaggagttggaggagtatcagcttttaaagccgtcatccacccccgaccagacaccgcatcacccttcttattaatctgggcaggatacgccttcaacgtcacaccatacccatacacctcgccattcttacccttaatctcgtcacgatcaatcaactcaacctcagggaaatagtagcgaataacctgatcgccatcaataatatccatcaacaaagcgtgaacacccgtcgtggcaccaggagaaatatcgaacgaacccgaatcggccccggcagtaaccttcgactgccaaaacagttcgataacctccttcttagactcgatcaactggaaagaaatctcgatagacgcctccgtagccacagtgcgaacaacatccgcattctgccaagccttcaaatcatccgttttacgctcaggcttaatcttaaacccgtcatcagacaggtaccctaaagcggtaagcccatcaggaaccgtcttcacaccatcaatagtgtcaccggcatgagctttaccaatatagacgtcacccgtaacagcagagcgaacattagacgctttacgtgttgcagccatcataacccccattaaatatcagacaattacattaaaacaaaaacaataagcttattcagactccgcaggcctacgtataagctcaaaaagcgaatacacatcaaaacgtgcaccatcaaccagcaaatcagggccagtagaccgtttacagtacaccacagggtcaccgtccacaccatccgccagcacagcctcaacacgacgagccaaagacatggcccgatcaggcatatcagaaaacacgttcacccgcaaaaacacctgctcgcgaacatgcaactgtgggccaccatcaagagccagccaaataaggtcaccctcaaactggtcaggcaccgtcccagtacacggcatatcggacagccagccatcatccttgagcacacgtttagcccacttcctggggtcaccgtagacgatcacgacgcagccccaatcgaccgggccagcgtgccatgcttcgcctcaatacgcttcccacccttataggtggtgccaatcctggcgacagcctcaacacggtgaacctgcacctcagacgacaaccctgcacgatactgggccctatcgaacgcgttaccgcctacattcgctgatgcggcacgccgcacctgctcgccacgctcagccaacatgccctgcacacccggcgcttttagcacctcacggataccaggaagattaagcttcacatcaacatcacgtgccacaaccatcagcccttcttacgcttcacattcacctgcgtgccagcatcccagccagtcatcggatgatgccacatcataggagacccgtcagcctcccacacaacaccccgaatacgccacctgcaacgataatcagcgcccacaacaggctgcttgaacagcatcgaccaatgctcatagtcagagtcacggcctgccgcctcatcctcctgcgacaacgaagaatagatggccacattatggaacacagtctcgacaggcttagaccagtcttccaccttgtctccaagatcatcgacacgaacagtcggatgaagcatcataaccgtttcaccgtaaggaaaactagtcatatcatatctcccacaaagggccagcgtagccgttaatatcagaaccgcacgaacaaccctcaccccacacagtagaacacacctcagaatgagcacatccaccacggatcgtgggtgtgatagtgaacgctttaccggcgccaccactctcgtcacacaacttcttcaacgcagcaatctcggaaggccacagcaagtttgtgggcgtattagaccgtgtcgtctgggagaacggccccgccatctcatactgcacctgacccgaaacaccggtatcattccagcgcagcaaagccctacgcaggatagccttagcggcatccttgtatttgaaatccggtttagcgatacagggggcgacactgatagccacagcctccacatcggcgatcatcgcctcaagcttcccttcaggaatatcggcgaaaggctcaatatcctcaggcttcaaaatgatacccatcaacaccaccccctgcacacagcataaacattatcgcaacaaatagatcagttaccagccggaggattcggggccggaggaggagtcggagcagccttctccttcacaacagcaaacgaatcaagcgactcaatagccacatacagcacagcctcggcacgaaccataacctcattatggcccttcaagtcacggccagtctgatccggatcgccatactcgatcagctcaatcgggaagttacgctggaacccccaatgaacacgagagaaatcacccacaatagccttaacacccgaggcaggcgacatctccggggcgccagacacagtcgaagaagcaccaacattcaggccacgccaattatccaaaccagcaaacccggcggcaggatacatcggctgaccggcaagcggagaccccttcggatacacctcagtcgacagagcaaacgagaacgccggatccaaagcaacaccgttaggaacctgcaaaccagccccagcaatcaggccgacagccttaacaagatcagccgtagcggaatcggttgcatcaaccgtcttcgaagtcttatccagcgacaccttgacagccgcagcaggcgtcccagtagcaggatcaataccatggaaagcaatcagatccacggcgcgaccaatcgaagcgccaagagcaggggaaatcagatcctgcaaaacacccagacggtaatccgcgtcagcccacataaactcgtccgagacgcgctgctgagtcacaaccttgataggctgcgcagtaaacgccgaaacaccaaccgaagcggaaggcttaacctcgccctcaccaacaatcttggcgcgaggaacaccactgaaaacagcacccttcacaggaccaaaaatagtcggctgctcaggcgacagcttagcaagaacaccagaatcgatagcacgatcacgaaccgcaccaatcatagaaccaggaagctcaagcttccctgcagaaagaaaatcgtcagccatcacaaatcatctcctagaattattgacaagagcatccacaaacgcgacaccctcacgtcgtttaacatcatcaacgggggcactccccgcaagacggcgcacacccgcgccaccaccactatggtcgatcaaacccttcaaagccttagcagactccaccaatgcttcacgatcgccaccgtgcaagaaagcgaccgcatcacccgacaggccacactcggcagccacctcacgcttcacaccctcaagaacaaacccattaatccggtcttcgagttcctcattcttgcggcgaagatcatcaatcacagaccccgcatcaccttccgaggcgcgaagcttctccaactcggcgaaattacttttagcacgagactcccacttacgggcctcagccttccaatccgtgccagaagaagactcctccttcacggaaacatcaccggcatgatcatcgccggcagcctgcccatccttcacaacatcaacaacgtctccaccctttccgggctcaacagcatcattgtcaacattctgttcctcaacactctgatcggccatagcctaacctaacactccttgcggaaaacaacacaacattgttgacccccgtgcgggagacaaccacgtgcaccgataaccggcggcacacaaccggaaaccatcatctcatgtcgccaacagtacgcatagccttcaaaatattgccaggcgactgctgcaacccatgatcatcaacccactcacgagccttctcataaacccgctgatatgcggtgtccgcagaggagggctcccaacgccccacaacctcaaccaccgtacaaccacaatgatcatgatacttcgaaccaaacggacgcttaccggcacgcttatgacgccgagtatgaccggtagtaagtgccctttccttagtcgtataatccgacctcgtagccaacatggcacaaaaagcacacggatcaccgtcagtcacccgacgccacgacctaccctgcgcacccgccgaccactcaaccgtgtcacggccagcattcatgacagcccgattaacacccgcagccatcgcatcaatcgtgtcattcaccctatccgggtcactctcaagaatcttcatagtcgaaaacgacctagccaacgcggcggcagcatcaaactcgtcatacacaatcaaacccggatccacaccattcaaccggcgaaaatcctgcacaaacctggcagccaacgatgccgaaccatcatggccggcacgctccaactccacacacaaacgcacatactgcgcatccgtcatcttcccggaatgccacaaacgaccaagctcggcataatagcccgcatacttcccggcaaaacgaatcgcctcacgctgatacccggcagcagccaaccgcgacgcaacacccgaagccaccgcctatcaaacctcgctagtctgccgcgatatagccccagccagcgccgccaacggatccgaagactcggcacgatgccgcatcacagcctcaacctgcacatcgtccaaacccaacatctccaacaccgtccgagaatccgccggaagaataccggcaccaacaagcttcgtcacagcatcagccgtagccgccctggtaggcgtcgaagcatcacgccaacgcaaacccacatcaccgaaaaacgcggcctcatcaacactcgaatccaacgccctagcagccagaaaaccaaccgacagccagccctgaccaaacgacgtctgacgccgctcagcacgcttcacaagcctcgactcctcggcag

SEQ ID NO: 86 - DNA, 14423 bp, Pahexavirus sp.
  source 1..14423: mol_type = genomic DNA
aatcgtgttgtgggtgccgagtgtggcgtgtcgggtgatgcggtggctttcttgcacggtggcgatcgtgaagcgctggtggagtctgctaaggctttgaagggtttgatcgaccatagtagtggtggcgcgggtgtgcgccgtcttgcggggagtgcccccgttgatgatgttaaacgacgtgagggtgtcgcgtttgtggatgctcttgtcaataattctaggagatgatttgtgatggctgacgattttctttctgcagggaagcttgagcttcctggttctatgattggtgcggttcgtgaccgtgctatcgattctggtgttttggcgaagctttcgccggagcagccgactatttttggccctgttaagggtgccgttttttctggtgttcctcgcgccaagattgttggcgagggtgaggttaagccttccgcttcggttgatgtttcggcgtttactgtgcagcctatcaaggttgtgactcagcagcgcgtaagtgacgagtttatgtgggctgatgctgattaccgtctgggtgttttgcaggatctgatttcgcccgctttgggggcttcgattggtcgcgccgtggatctgattgctttccacggtattgatcctgccactgggaagcctgccgcggctgtcaaggtgtcgctagataagacgaagaagacggttgatgccaccgattccgctacggctgatctggtcaaggctgtcggccttatcgctggggctggtttgcaggttcctaacggtgttgctttggatccggcgttctcgtttgctctgtctactgaggtgtatccgaaggggtctccgcttgccggtcagccgatgtatcctgccgccggttttgcctgtttggataattggcgcggcttgaatgttggttcttcttcgactgtttcgggtgccccggagatgtcgcctgcttctggtgtgaaggctattgttggtgatttctctcgtgtccattggggtttccagcgtaacttcccgatcgagctgatcgaatatggcgatccggatcagactgggcgtgatctgaagggccataatgaggttatggttcgtgccgaggctgtgctgtatgtggctatcgagtcgcttgattcgtttgctgttgtgaaggagaaggctgcaccgactcctcctccggctggtaactgatacaagataagcgaatgtgtactatgtgcagggggtggtgttgatgggtatcattttgaagcctgaggatattgagcctttcgccgatattcctagagagaagcttgaggcgatgatcgccgatgtggaggctgtggctatcagtgtcgccccctgtatcgctaaaccggatttcaaatacaaggatgcagctaaggctattctgcgcagggctttgttgcgctggaatgatactggcgtgtcgggtcaggtgcagtatgagtctgcgggtcctttcgctcagactacacggtctaatactcccacggatttgttgtggccttctgagattgccgcgttgaagaagttgtgtgagggtgatggtggggctggtaaagcgttcactatcacaccgaccatgaggagtagtgtgaatcattctgaggtgtgttccacggtgtggggtgagggttgttcgtgcgggtcgaatattaacggctacgctggccctttgtgggagatatgatatgactagtttttcttacggtgaaacggttgtgatgcttcatccgactgttcgtgtcgatgatcttggcgacaaggtggaagactggtctaagcctgtcgagactgtgttccataatgtggccatctattcttcgttgacgcaggaggatgaggcggcaggccgtgactctgactatgagcattggtcgatgctttttaagcagcctgttgtgggtgccggttatcgttgccggtggcgtatccggggtgttgtgtgggaggctgacgggtctcctatcgtgtggcatcacctcatgtccggttgggatgcgggcacgcagatcaatgtgaagcgtaagaagggctgatagattgtggctcaggatgtgaatgtgaagctgaacttgccgggtattcgtgaggtgttgaagtcttctggggtgcagtcgatgttggctgagcgtggcgagcgtgtgaggcgtgcagcctcggcgaatgtgggcggtaacgcttttgataaggcccagtatcgtaatggcttgtcgtcggaggtacaggttcaccgtgttgaggccgtggcgaggattggcaccacctataagggtggtaaaaggattgaggcgaagcatggcacgttggcccggtcgattggggctgcgtcgtgatcgtttacggtgaccccaggaagtgggctaaacgtgtcctggcggatgatggctggctgtccgatataccgtgtactgggacggtgcctgaccagtttgagggtgacctgatttggttggcgttggatggtggcccgcagttgcatgttcgtgagcaggtttttttgcgggtgaatgtgttttctgatacgccggatcgtgctatgtcgttggcgcgtcgtgttgaggctgttctggctgacggcgtggacggtgaccctgtggtgtactgtaaacggtctactggtcctgatttgctggttgatggtgcacgttttgatgtgtattcgctgttcgagctgatatgtaggcctgtcgaatctgagtaaacgtatttgtttttgttttaatgtaattgtttgatatttaatgggggttgtgatggctgcaacacgtaaagcgtctaatgttcgttcagcggttactggcgacgtttatattggtgacgcgcacgcgggtgatactagtaagggtgtggaggcggttccttccgggcttacagctttagggtatctgtcggatgacgggtttaagattaagcctgagcgtaaaacggatgatttgaaggcttggcagaatgcggatgttgttcgcactgtggctacagagtcgtctatcgagatttctttccagctgatcgagtctaagaaagaggttatcgaactgttttggcagtcgaaggttactgccggagccgattcgggttcgttcgatatttcacctggtgccacgacgggtgttcacgccctgttgatggatattgttgatggtgaccaggttattcgctactatttccctgaggttgagttgatcgatcgtgacgagatcaagggcaagaatggcgaggtgtacgggtatggtgtgacgttgaaggcttaccctgctcagattaataagactggtaatgcggtgtctggacgggggtggatgacggctttaaaagctgatactcctccgactcctcctacgccgcctaagcctgggccggatccgaatccgccgtctaataactgatacacattgtttgagggattgttgatagatgagtgacacaggttacacgttgaagattggtgaccgtagctgggtgttggcggatgcggaggaaacagcgcaggctgttcctgcccgcgtttttcgccgtgccgccaggattgcccagtctggggagtctgctgatttcgcccaggttgaggtgatgttttctatgttggaggctgccgccccggcggatgcggtggaggccctggaggggcttcctatggttcgtgttgctgagattttccgccagtggatggaatacaagcctgaccagaaagcggcctccctgggggaataatttggctccacggcctgattgatgattatcgtggggccatcgaatacgatttccgcactaaatttggtgtttctgtttatagtgttggtggcccgcagatgtgttggggtgaggctgtccggctggctggcgtgttgtgtaccgatacgtctagccagttggcggcccacctgaatggttggcagcgcccgtttgagtggtgtgagtgggctgtgttggacatgctggatcattacaggtctgctaatagtgaggggcagccggagcctgtggcgaggcctacggatgagcgtagggcccggtttacgtctgggcaggtggacgatattttggcgcgtgttcgtgccggtggcggggtgtctcgcgagattaatattatggggtgaatagtgtatgtctggtgagattgcttccgcatatgtgtcgttgtatacgaagatgcctggccttaaaagtgatgttggtaaacagttgtcgggtgtgatgcctgctgagggtcagcgttcgggtagcttgtttgctggcgggatgaagttggcgcttggtggtgcggcgatgatgggtgccatcaatgttgctaagaagggcctcaagtctatctatgatgtgactattggtggcggtatagctagggcgatggctattgatgaggctcaggccaaactgactggtttgggtcacacgtcgtctgacacgtcttcgattatgaattcggctattgaggctgtgactggtacgtcgtatgcgttgggggatgcggcgtctacggctgcggcgttgtctgcttcgggtgtgaagtctggcgggcagatgacggatgtgttgaagactgtcgccgatgtgtcttatatttcgggtaagtcgtttcaggatacgggcgctatttttacgtcggtaatggctcgcggtaagttgcagggcgatgacatgttgcagcttactatggctggtgttcctgtgctgtctttgcttgccaggcagacgggtaaaacctcggctgaggtgtcgcagatggtgtcgaagggacagattgattttaacacgtttgcggctgcgatgaagcttggcatgggtggtgctgcgcaggcgtctggtaagacgtttgagggcgctatgaagaatgttaagagccccctgggttatttgggtgctacggctatggccccgtttcttaacggtttgcggcagatttttgttgcgttgaatccggttatcaagtctatcacggagtctgtgaagcctttgtttgcgtcggtggatcaggggattcagcggatgatgccgtctattttggcgtggattaaccgcatgccgggcatgatcacgagaatgaatgcacagatgcgcgccaaggtggagcagctgaagggcatttttgcaaggttgcatttgcctgtccctaaagtgaatttgggtgccatgtttgcgggtggcaccgcagtgtttggtattgttgctgcgggtgtcgggaagcttgttgcggggtttgccccgttggcggtgtcgttgaagaatctgttgccgtcgtttggtgctttgaagggtgccgccggggggcttggcggcgtgtttcgcgccttgggtggccctgtcgggattgtgatcggcttgtttgctgccatgtttgccactaacgcccagttccgtgccgctgttatgcagcttgttggtgtggttggtcaagccctggggcagattatggccgctgtgcagcctgtgtttggtctaattgctggtttggtggcacggttggcgccagtgtttgcccagattattggtttggttgccgggttagcggcgcagcttgtgcctgtgatcagtatgttggttgcccggctggttcctgtgatcacgcagattattggtgcggtgacgcaggttgctgccatgttgttgcctgcgttgatgccggtgttgcaggctgttgtggctgtgatacgtcaggttgttggtgtggtcatgcagttggtgccggtgttgatgccggtgattcagcagattttgggtgctgtcatgtctgtgctgccacctattattggtcttatccggtcgttgatgcctgtgatcatgtctgttatgcgtgtggtggttcaggttgttgcggttgtgatacaggtggtggcccgtattcttgctgttgtggctccggtggtggcggccgtggtcgggtttgttgcccgtattgttggtgctgtcgtgtcggctgtggcccgtgttattgccgctgttgcccgtgtcatctcgtgggttgttgcccattttgtgtctggtttggcgcgtatgggttcggtggttcaggctggctggaatcatattagggcgtttacgtctgcgtttattaatggtttcaagtcggtgatttctggcggcgtgaacgcggttgtggggttttttgcccggctgggttcttcggttgccgcccatgtgaggtctggttttaacgcggctcgtggtgctgtttcttctgcgatgaatgctatccggagtgtggtgtcttcggtggcgtctgctgttggcgggtttttcagttcgatggcgtctagggttcgtggtgctgcctcgtccgggtttaacgctgcgaggggtgcggcttcttctgctatgcatgctatgggctcggctgtgtctagtggtgtgcatggtgtgctgggttttttccggaatttgcctggcaatattaggcgtgctctcggtaacatggggtccttgttggtgtcggctggccgtgatgtggtgtctggtttgggtaatggtatcaagaatgctatgagtggcttgttggatactgtgcgtaatatgggttctcaggttgctaatgctgcgaagtcggtgttgggtattcattccccgtctcgggtgtttcgtgaccaggttggccggcaggttgttgccggtttggctgaggggatcaccgggaatgctggtttggcgttggattcgatgtcgggtgtcgcttcgcagcttccggatgctgtggatgcccggtttggtgtgcgatcgtctgtgggctcgtttaccccgtacgaccggtatcggcgtgctcagggtgagagtgttgtggtgaatgtgaatggcccgacgtatggtgatcctgccgagtttgcgaagcggattgagcggcagcagcgtgacgcgttgaacgcgttggcttacatgtgagtaaaggggtatgcatgtttattcctgacccgtctgatcgttctggtttgactgtgacatggtcgatggatccgcggtttggcgacgagcgtgtgcttcatttgacggattatacggggtcgtctcctgtcatgttgttgaatgattcgttgcgcggcttgggtgttcctgaggttgagcatttttctcaaactcatgttggggtgcacggctcggagtggcgcggttttaatgtgaagcctcgcgatgtgacgctgccggttttggtgtcgggtgttgacccggatccggatggcgggtttcgtgacggttttttgaaggcgtatgacgcgttgtggtctgcgtttcctcctggcgaggagggggagttgtcggtgaagactcctgccggtgttgagcgtgtgttgaagtgcaggtttgattcggctgatgacacgtttacggtggatctggtgaatcgtggctatgcgcgttatgtgcttcatttgacagcttatgacccgttttggtatggggatgagcaaaagtttcgttttagtaacgcgaagttgcaggattggctgggtggcggtcctgtcggcaagaagggtacagcgtttcctgtggtgttgacgcctggtgttggttcgggctgggataacctgtcgaataagggtgatgtgcctgcgtggcctgtgattcgtgtcgagggcccgttggagtcgtggtctgtgcagattgatggtttgcgtgtgtcttcggattaccctgtcgaggagtttgattggatcactattgacacggatcctcgtaaacagtctgcattgttgaatgggtttgaggatgtgatggatcgtttgacagagtgggagtttgcccctatcccgcctggcggttctcggagtgtgaatattgagatggttggtttgggtgccgttgttgtgtcggtgcagtacaggtttttgagggcttggtgaatggttgatggctggtcttgttccgcatgtaacattgtttacgccggattatcgtcgtgtggcgcctatcaatttttttgagtcgttgaagttgtcgttgaagtggaatggtttgtccactttggagttggtggtgtctggtgatcattctaggcttgacgggttgactaggccgggtgcacggctggttgttgattatggtggtggccagattttttctgggcctgtgcgtcgggttcatggtgtgggtccttggcagtcttcgcgggtgactatcacgtgtgaggatgatattcgtctgttgtggcgtatgctgttgtggcctgtgccttatcgttccagcatcattgggatggagtggcgtgccaatagggattatgcccactattcgggtgcggcggagtcggtcgctaagaaggcgttgcgggataatacttggcgttttccgcctgatatatttatggtggatgataagagtcgtggccgctatattaaggattttcaggcgcggtttcacgtgtttgccgataagttgttgccggtgttgtcgtgggctcggatgactgtcacggtgaaacagtttgagaatgtggagcaggatcagcgtggtttaatgtttgattgtgtgcctgctgtgacccgtagtcatgtgttgactgccgagtctgggtctattgtgtcgtgggagtatgtgcgtgacgccccgaaggctacggcggtggttgtgggtggccgcggcgaaggcaaagatcggctgttttgtgaggatgttgattcgatggccgaggatgattggtttgatcgtgtcgaggtgtttaaggatgcccgtaacaccgatgagaaggcgcctcttatcgatgaggctgagcgggtgttgtccgagtcgggggctacgtcggggtttaagatagagttggctgagtcggatgtgttgcgttttgggccaggcaatctgatgcccggggatttgatctatgtggatgtgggctcggggcctattgcggagattgttcggcagattgatgtggagtgtgtatcgcctggtgatggttggacgaaggtgactcctgttgcgggggattatgaggataatccgtcagcattgttggctcgccgtgttgccggtttggctgccggtgtgcgggatttgcaaaaattctaattgttaggggtttgttgtgggtattgtgtgaaagggttttgatggtgtgttgaccgagtatgattgggctcaaatgtctggtctgatgggtaatatgccgtctgtgaagggcccggatgattttcgtgtgggcactactgttcagggtgccacagtgttgtgtgaggtcctgccggggcaggcttgggctcacggggtgatgtgcacgtcgaatagtgttgagacggtgacgggccagctgcctggccctggcgagacccgatacgactatgttgtcctgtctcgggattgggagcagaatacggccaagttggagattgttcctggggggcgtgcggagcgtgcccgtgacgtgttaagggctgagcctggcgtgtaccatcagcaactgttggctactttggtgttgtcgcctaacgggttgcagcagcagcctgacaggcgtgctgtggcggctcgtgtggcgtttggggagtctgctgcgtgtgacccgacccctgtggagggtgaccgggtgatggttccttctggggctgtgtgggctaatcatgccggcgagtggatgctactgtctccgaggattgagacgggttctaagtcgatcatgtttggcgggtctgctgtgtatgcttacacgattccgtttgagcgccagttcagtagtgcgcctgttgtggtggcttctatgggcacggcggctggtggtacgcagcagattgatgtgaaagcctacaatattactaataaggattttggtttggcgtttataacgaatgacggttcgaagccttctggtgtgcccgcgatagctaattggattgctgacggcgtgtgaccgggctgttgctgctgatgctgtaatgttggggggctgtggtgtcgtggattactcctgcaccggtggcttctatctgtacggcgttggccacggttttgggttctgttcaggcggtcacatctaaatctcggaggcgtttgcgccgcctgtctgcgcaggtggatgcgatggaagagtatacgtggggtgtgcgacgcgaggtgcgccggtttaacgctggtcttcctgatggggttgatccgcttgttttgcctgatctgcctggttttttgcaggattcgttggggggtgaatgatgagggagttggaggaggaaaagcggcagcgccgctcgtttgagaaggcgtctttgttgttgttgtttttgtcgcttgtactactggtggtggttgctgcgggtgctttacgtttcggggctgtatcctctgagcgggattcggagcaggctaaagcccagtctaatggtacagccgctaaaggtttagccagccgtgtgaagcaggtgtgtacctagggtggcgtggagtctgcgcggcttcaccagtctggtttgtgtgtggatgctcagcgtgttgagcagagtgtgcagggtgtgcctggcccggctggtgtgcgtggcccgcaaggcccgcaggggccggctggtgttgatggttcggctgggctggttgggcctgttggtcctcaggggtctccgggtttgaatggtgtggctggcccgcaagggttgcctggcgctgacggcaaggatggggttccgggtcgtgctggtgctgatggccgtgatggtgtgcctggtagggatggcgctgatggggctgatggtggtcgtggcccgcaagggccggctggcgctgacggtgcacagggtgaacagggtgagcgtggccctgccggtcctgtgggtcctgtaggtccgcagggttctgccggcgccgacggcacgaatggtcgggatggcaaggacggtaaggacggtaaggatgggcgctcggtgatatcggtgtactgttccgggggccgcctggtggtgaaatatagtgacggtacggcctctaccgtgtcgggttctgcagcctgcgagagtgtgaaaccgtcacctgtggttaccgtatcatcccacaagtaaaagaggaagggtgttactagtgttgatagtagtgtttgggggtggcgtgttgtgagatacattccagcggcgcatcactcggccggatcaaataagccggtgaaccgtgttgtgattcatgcgacatgcccggatgtggggtttccgtctgcttcgcgtaaggggcgggcggtgtccacggcgaactattttgcttccccatcgtcgggtggttcggcgcattatgtgtgtgatattggggagacggtgcagtgcctgtcagaggggtctattggttggcatgccccgccgaatccgcatagtttgggtatagagatttgcgcggatggcggttcgcacgcctcgttccgggtgccagggcatgcttacactcgtgagcagtggctggatcctcgggtgtggcccgcggtggaaagagcggcggtgctgtgccggcagttgtgtgacaagcatggtgttccgaagaggaaactctcggtggccgatttaaaggccggcaggcggggtgtttgcgggcatgtggatgttacggatgcgtggcatcagtcggatcatgacgatccgggtccctggtttccgtgggacaggtttatggccgtagtctgcggcggtagtagtagtgatagtggggagttaactgtggctgatgtgaaagccttgcatgatcagattaaacaattgtctgcgcagcttgccggttcggtgaataagctgcaccacgatgttggtgtagtgcaggtgcagaatggtgaccttggtaagcgtgtggatgccctgtcgtgggtgaagaatccggtgacggggaagttgtggcgcaccaaggatgctttgtggagtgtctggtattacgtgttggagtgtcgtagccgtattgacaggcttgagtctgctgttaatggtttgaaaaagtgatggtggtttgttgtgggtaaacagttttggttgggcttgttggagcgtgccctgaaaacttttgtgcaaacgtttgttgctgtgttgggggtgacggcgggtgtcacgtatacggcggagtcgtttcgcggtttgccgtgggagtctgcgctgatcacagccggggttgctgctgtcctgtcggttgctacttcgtttggtagcccgtcgtttgtggctggtaagcccggcaagtctcagctggatgcgggtttggttccaccggatgatgggggcttggttgagcctcacatggttgatgtgtcggatcctggcatgatcgagccgacggatgatgcggatggttttgcgggctatgagcctcggcgtgcggccgagtcggaggttggcacggtagagtctactgttgcataagtgaatatagatgtgtgccccagcggtgctgccacgattgtgtggtggttgccgctggggcactatttctgtatattgcggtgtggctataattcgttgctgtcgatggtgtcttcgagcatctggtacaggtggaggcaggtgcagatcgtatcgctggcctggtctagaacgttccggccgataacgtttttgtggttgtcgcggtggcggatgatagcccacatgatctcgtcggctgccgcctgcaatagtttggcctggtatgcgattcctgcgagccagtctagtacttcctggcttgcataggggctctgttcctcgctgttgtcacgggtgttgctgttgtttgtggggcgtcctgcactgtcgcataaccacaggatttcgctgcactcgtctagcgtgtcctggtcgatagcgagatcgtcgaggctgacattgttgacggtaaggttcacgctgtcgagggagatgggtacaccgtactggttttcgacaccgtcaacaatgctttccagctgttgcatgttggtgggctgttgttggacgatacggtgtatcgctgtgttgagggtggtgtaggtgatattgtgtgtgttgtccatggttttatcccatccctgtgctgtcgtcgttttcgtctggcatgtagtatgtgctgtttgcgtactcggttaacgtcatcagtgtttggtctgcccactgtttcacggtttgtcttgtcacacccaatcgttgggctgccaccgaataggtttggtcatacccgtatacttcacggaacgctgccaacctagctagccgtttcctttgtttggatggctggcaggtgagggtgtagtcgtcgatggctagctgtagatcgatcatggtggcaatgttgttgccgtggtgttgtggcgcggttggtgggtgtggcatgcccggctccacactcggtttccatggtccgccgttccagatccattgcgcggcttggatgatgtcggcggtggtgtaggttcggttcactggtcatcccctgaataggttgtcgaggttgtcttggttgctggtgttggtggtgtcgaatcgtccgacgcagtggcagtagtcgtacatgagtttgataatgtgttggtggtctcccaaataggtgtttccgctgatgctgtaggaggctgtgccgtctttgctgatggtgtatttggcggtgatggtttcgggtgtttctgtgttggtgatgatggctgtggtggtggtgcctactgtttgtagcctggtggtttgggtgccgtcgtcgagtatggttgtgaccatggtgtgtgttctccttttcagttgctggtttggttgtcggctagatgaatgatgtcgggtaaaggtttcggctggtctaggtgttgtatggttttgttggctagccgtttggctaccctgtagcacattttggtgtagtgtttgttgtctaggttgtggtattgttcccgcaccgcaatatatagtagcgagtcttggtagcggtcgtctgcactgattgcggggtagtgtgcggctgttttggtgcatgcccggttgagtgtgcgtagatgatggtctgtggcccacacccacgatgcggtggtggccaggtctgcttttgttggtcgtctgctcatagcactatttcatctcgctatctgatagttgtttggtgttttgttgatgatagtgtagcacacgagtccggggtggccggtggtgcctgtgcggtgccggaaccatgtggattcgccttccatggatgggcattggatgaaggtgcgttgtccttgctcggagatttctaggtggtgccggtgccctgccatgagtatatgggatgtggtgccgttgtggaattcttggccgcgccaccaatcatagtgttggttgttgcgccattggtgtccgtgtgcgtggaggatccgtgttccggccacatcaacggtggtggtcatttcgtcgcgttcggggaaataaaagtggaggttggggtattggttggtgagttggtaggcttctgcgatggcgcggcagcagtctacgtcgaaggagtcgtcgtaggtggtgactcctttgccgaagcgtacggcttcgccgtggttgccggggatggatgtgatggtcacgtttttgcat

SEQ ID NO: 87 - DNA, 9365 bp, Pahexavirus sp.
  source 1..9365: mol_type = genomic DNA
ataagagacagactccctcacaattcatcccccaccaccatcaacagtatccctcaaaaactcgggcaaatcaggcatctttaccggctcaacattctccggcagattcgcgttatagcggtgaacaatatggcgaatattccacgtgtactcttccatcgcatcaacctgcgcagacaactgcctcagcctcttcttcgacctgtaagtaaccgcctgaatcgaaccaagaacagtagcgatagcggtacaaggagaggctacaagcgtaggtgtaaaccatgacactacagccccctaccactacaacaaccacaacacgtcacatacccgcaagccgcacattacacgccgacagcaatccaattagccaccgcaggcacaccagaaggcttcgacccgtcattcgtgataaacgccaaaccaaaatccttggcagtaatattataggctttcacatcaatctgtgtcgtacccccagccgccgtagccatagacgccaccacaacaggcggactactgaactggcgatcaaacgggatcgtgtaagcatacacattcgaaccaccaaactggatctgcttagtgcccgtctcaatcctcggagacagtagcatccactcgccggcatggttagcccacacagccccagaaggaaccatcacacggtcaccctccacaggggtagggtcacacgcggcagactccccaaacgccacacgggcagctatagcacgcctatccaactgctgctgcaacccgtcagacgacaacaccaaagtagccaacaactgctgatggtacacgccaggctccgcacgcaacacatacctggcacgctccgcacgccccccaggaacaatctccaacttggccgtattctgctcccaatcccgagacaacaccacatagtcatagcgggtcaccccagggcccggcagctggcccgtcaccgtctccacactattcgacgtgcacatcaccccgtgagcccaagcctgccccggcaggacctcacacaacactgtggcaccctgaatcgtcgtgccgacacgaaaatcgtccggcccatgaacggacggcacattacccatcagaccagacatttgagcccaatcatactcggtcaacacaccatcaaaccctttacacacaatacccacaacaaacccccaattttgttttaaaatttttgcaaatcccgcacaccggcagccaaaccagcaacacggcgagccaacagggccgacggattatcctcataatcaccggcaataggagtcaccttcgtccacccgtcaccaggcgatacacactccacatcaatctgccgaacaatctccgcaataggacccgagcccacatccacatagatcaaatcccctggcatcagattgccaggcccaaaccgcaacacatccgactccgccaactcgatcttaaaccccgacgtggccccagactcccctaacacccgctcagcctcatcaataagatgcacatgttcagaatccgtgttacgggcatccttaaacacctcgacacgatcaaaccagtcatcctcggccatcgaatcaacatcctcacaaaacagccgatcccggccctcgccacggccacccacaaccacagatgtcgccttcggggcgtcacgcacatactcccacgacacaatcgaacccgactcggcagtcaacacatgcttccgggtcaccgcaggcacacaatcaaacagtaaaccacgctgatcctgcttcacattctcaaactgtttcaccgtgacagtcatccgagcccacgacaacaccggcaacaacttatcggcaaacacgtgaaaccgcgcctgaaaatccttaatatagcggccacgactcttatcatccaccataaatatatcaggcggaaaacgccaagtattatccctcaacgcctgcttagccaccgactctgccgcaccagaatagtgggcataatccctgtccgcacgccactcagaccccaccaaaccaggacgataattcacaggccacatcaacatacgccacaacaggcgaatatcatcctcacacgtgacagtcaccctagaagaccgccaaggcccaacaccatgtactttacgcaccggtccagaaaaaatctggccgccaccataatcaacaaccagacgtgcacccggcttcgtcaacgcatccaacctagaatgatccccagacaacaccaactccagtgtcgacaaaccattccacttcaacgacagtttcagcgactcaaaaaaattgataggcgccacacgacgataatccggtgtaaacaatgttatctgcgggacaagaccagccacaacaattcaccaagccctcaaaaacctgtactgcaccgacacaacaatggcacccaaaccaaccatctcaatattcacactcttagaaccgccaggcggaatcggggcaaactcccactctgtcaaacgatccatcacatcctcaaacccgttcaacaacgccgactgctggcgaggatccgtatcaatagtgatccaatcatactcctcgacaggataatcagaagacacacgcaaaccatcaatctgcacagaccacgactccaacgggtcctcgacacgaatcacaggccacgcaggcacatcacccttattagacagattatcccaacccgagcccacacccggtgttaacaccacaggaaacgccgtgccatccttgccgacagggccgccacccagccaatcctgcaacttcgcgttactaaaacgaaacttctgctcatccccataccaaaacgggtcataggccgtcaaatgaatcacatagcgggcatagccgcgattcaccggatcaaccgtaaacgtgtcatccaccgaatcaaaccggcaccgcaacacacgctcacgaccggcaggagtcttcacagacaactcccccacctcgcccggaggaaaagcagaccactacgcgtcataggctttcaaaaaaccgtcacgaaacccgcccaccggatccgggtcaacacccgacaccaacaccggtaatgtcacctcgcgaggcttcacattaaacccgcgccactccgagccgtgcaccccaacatgtgtttgagaaaaatgctcaacctcaggaacacccaaaccgcgcaacgaatcattcaacaacatgaccggagacgcacccgtataatccgtcagatgaagcacacgctcatcgccaaaccgcggatccatagtccaatccacagtcaaaccggcacgatcagacgggtcaggaataaacatgcatacccctttactcacatgtaagccaacgcgttcaaagcgtcacgctgctgacgctcaatccgcttcgcaaactcggcaggatcaccatacgtcgggccattcacattcaccacaacactcttatcattcatccgctgatacctgccatacggggtaaacgagcccaccgacgatcgcacaccaaaccgggcatcaacagcatccggaagctgcgaagcaacacccgacatcgcatccaacgccaaaccagcattaccggtgatcccctcagccaaaccggcaacaacctgacggccaacctgatcacgaaacacccgagacggggaatgaatacccaacacagacttcgccgcattcgcaacctgagaacccatattacgcaccgtatccaacaggccactcatagcattcttaataccgttacccaaaccggccaccacatcacggccagcagacaccaacaaggaccccatactacccaaggcacccctaatattgctgggcagattccggaaaaaacctatcacactatgcacaccactagacacagccgagcccatagcgtgcatagcagaagaagccgcacctctcgcagcgttaaacccgggcgaggcagcaccacgaaccctagacgccatcgacccgaaaaacccgccaacagcagacgccaccgaagacacaacactacggatagcattcatcgcagaagaaacagcgccacgagccgcgttaaaaccagacctcacatgggaggcaaccgaagaaccaagccgggcaaaaaaccccacaaccgcgttcacgccgccagaaatcaccgacttgaaaccgttaataaacgcagacgtaaacgctctaatatgattccagccattcaagatggccgtgcccatagacctcacgccagacactaaatgattcacaacccatgaaatgacacgggtgacagtcccaataatccgggctgcagcagacacaatagcgccaagaatacgtgcaacaaacccgatcacagctgtcacaatcggcatcacaaccggaataatgcgggccaccacctgcagcacaaccgaaacaacctgcaccactacacgcataatcgacatgatgactggtatcagcgaccggatcaggccgatgataggcggcagaacagacatgaccgcacccaaaatttgttgaatcacaggcatcaaaacaggcaccaactgcatcacaacaccaacaacctgccgtatcacagcaacaacagcctgaataaccggcatcaacgcaggcagcaacatggcagcaacctgtgtcaccgcaccaataatctgcgtgatcacaggcaccagccgggcgacaagcatactaatcaaaggcacaatctgggcagccaaaccggcaaccataccgataatctggccaaacacgggcgccaactgggtcaccagccccgcaaccaaaccaaacaatggctgaatggccgccataatctgccccagggcttgaccaaccacaccaacaagctgcataacagcggcacgaaactgggcgttcgtagcaaacatggcagcaaacaagccgatcacaataccgacagggccacccagggcgcggaacacgccgccaagcccgccagcggcacccttcaaagcaccaaacgacggcagtagattctttaacgacaccgccaacggggcaaaccctgcaacaagcttccccacacccgcagcaacaataccaaacactgcggtgccgccagcaaacatggcacccaaattcactttagggacaggcaaatgcattctcgcaaaaatgcccttcaactgctccgccttggcgcgcatctgtgcattcattcgtgtgatcatagccggcatccggttaatccacgccaaaatagacggcatcatccgctgaataccctgatccaccgacgcaaacaggggcttcacagaatccgtgacagacttaataaccggattcaacgcaacaaaaatctgccgcagaccgttaagaaacggcgccatagccgtagcaccaagatagcccagggcgctcttaacattcttcatagcgccctcaaacgtcttaccagacgcctgcgcagcaccacccatgccaagcttcatcgcagccgcaaacgtgttaaaatcaacctgccccttcgacaccatctgcgacacctcagccgaggttttacccgtctgcctagccaacagagacagcacaggaacacccgccatcgtaagctgcaacatgtcatcgccctgcaacttaccgcgagccatcacagacgtaaaaatagcgcccgtatcctgaaacgacttaccagaaatataagacacatcggcgacagtcttcaacacatccgtcatctgcccgccagacttcacacccgaagcagacaacgccgcagccgtagacgccgcatcacccaacgcatacgacgtaccagtcacagcctcaatagccgaattcataatcggagacgtgtcagacgacgtatgacccaaaccagtcagtttagcctgagcctcatcaatagccatcgccctagcaataccgccaccaatagtcacatcataaatcgacttgaggcccttcttagcaacattgatagcacccaccatcgcggcaccaccaagcgccaacttcatcccgccagcaaacaagctacccgaacgctgaccctcagcaggcatcacacccgacaactgtttaccaacatcacttttaaggccaggcatcttcgtatacaacgacacatatgcggaagcaatctcaccagacatacactattcaccccataatattaatctcgcgagacaccccgccaccggcacgaacacgcgccaaaatatcgtccacctgcccagacgtaaaccgggctctacgctcatccgtgggcctcgccacaggctccggctgcccctcactattagcagacctgtaatgatccagcatgtccaacacagcccactcgcaccactcaaacgggcgctgccaaccattcaggtgggccgccaactggctagacgtatcggtacacaacacgccagccagccggacagcctcaccccaacacatctgcgggccaccaacactataaacagaaacaccaaacttggtgcggaaatcgtattcgatggccccacggtaatcatcaatcaggccgtggagccaaactattcccccagcgaggcacccttaccgtcaggcttatattccatccactcacggaaaatctcggcaacacgaaccataggaagcccctccagggcctccacagcatcagccggtgcggcagcctccaacatagaaaacatcacctcaacctgggcgaaatccgcagactcacccgactgggcaatcttagcggcacggcgaaacacgcgagcaggaacagcctgagccgtctcctccgcatccgccaacacccagctacggtcaccaatcttcaacgtgaaaccagtatcactcatctatcaacaatccctaaaattgtgtatcagttaccagacggcggattcggatccggcgtaggcttcggagaaggaggcggggtcggaggagtatcagcttttaaagccgtcatccacccccgacccgacaccgcattacccttcttattaatctgggcaggatacgccttcaacgtcacaccatacccatacacctcgccattcttacccttaatctcgtcacgatcaatcaactcaacctcagggaaatagtagcgaataacctgatccccatcaacaatatccatcaacagagcgtgcacgccagtggtggcaccaggggaaatatcgaacgaacccgaatcggctccggcagtaaccttcgactgccaaaacagttcgataacctccttcttagactcgatcagctggaaagaaatctcgatagaagactccgtagccacagtgcgaacaacatccgcattctgccaagccttcaaatcatccgttttacgctcaggcttaatcttaaacccgtcatcagacaggtaccctaaagcggtaagaccgtcaggaaccgtcttcacaccatcaatagtgtcaccggcatgagctttaccaatatagacgtcacccgtaacagcagagcgaacattagacgctttacgtgttgcagccatcataacccccattaaatatcaaacaattacattaaaacaaaaacaataagcttattcagactccgcaggcctgcatatcagctcaaaaagcgaatacacatcaaaacgtgcaccatcaaccagcaaatcagggccagtagaccgtttacagtacaccacagggtcaccgtccacaccatcagccagcacagcctcaacacgacgcgccaacgacatagcacgatccggcatatcagaaaacacattcacccgcaaaaaaacacgctcacgaacatgcaactgcgggccaccatccaacgccaaccaaatcagatcaccgccgaaatcgtcaggcaccgtcccagtacacggtatcccagacagccagccatcgtccgccaacacacgtttagcccacttcctggggtcatcgtagacgatcacgacgcagccccaatcgaccgggccagcgtgccatgcttcgcctcaatccttttaccacccttatatgtggtgccaatcctcgccacagcctcaacacggtgaacctgtacctccgacgacaagccattacgatactgggccttatcgaaagcgttaccgcccacattcgccgaggccgcacgcttgacacgctcgccacgctcagccaacatcgactgcaccccaggagacttcaacacctcacgaatacccggcaagttcagcttcacattcacatcctgagccacaatatatcagcccttcttacgcttcacattgatctgcgtgcccgcatcccaaccggacatggggtgatgccacacgataggagacccgtcagcctcccacacaacaccccgaatacgccaccggcaacgataaccggcacccacaacaggctgctcgaaaagcatcgaccaatgctcatagtcagagtcacgccccgcggcctcatcctcctgctacaacgaagcatagatggcaacgttatggtacacagtctcgacaggcttagaccagtcttccaccttgtcgccaagatcatcgacacgaacagtcggcttaagcatcacaaccgtttcaccgtaaggaaaactggtcatatcatatctcccacaaagggccagcgtagccgttaatattcgacccgcacgagcaaccctcaccccacaccgtggaacacacctcagaatgattcacgctactcctcatggtcggtgtgatagtgaacgctttaccagccccaccatcaccctcacacaacttcttcaacgcagcaatctcagaaggccacaacaaattcgtgggagtattcgaccgtgtagtctgggagaacggccccgccatttcataccgcacctgacccgacacgccggtatcattccagcgcagcaaagccctacgtaggatagccttagcagcatccctatatttgaaatccggtttagcgatacagggggcgacactgacagccacagcctccacatcggcgatcatcgcctcaagcttcccctcaggaatatcggcgaaaggctcgatatcctcaggcttcaaaatgatacccatcaacaccaccccctgcacatagtacacattcgcttatcttatatcagttaccagccggagtattaggctcaggcttcggcggattcggggccggaggaggagtcggtgcagccttctccttcacaacagcaaacgaatcaagcgactcgatagccacatacaggacagcctcggcacgaaccataacctcattatggcccttcaaatcgcggccagtctgatccggatcaccatactcgatcagctcgatcgggaaattacgctgaaaaccccaatgaacacgagagaaatcaccaacaatagccttaacaccagaggcaggcgacatctccggggcacccgaaacagtcgaagaagcaccaacattcagcccacgccaattatccaaaccagcaaaccggcggcaggatacatcggctg

SEQ ID NO: 88 - DNA, 7882 bp, Pahexavirus sp.
  source 1..7882: mol_type = genomic DNA
gcctgagccgtctcctccgcatccgccaacacccagctacggtcaccaatcttcaacgtgtaacctgtgtcactcatctatcaacaatccctaaaatcgtgtatcagttctcagacggcggattaggatccggcttcggcgaaggaggaggcgtcggaggagtatcagcttttaaagccgtcatccacccccgacccgacaccgcatcacccttatgattaatctgggcaggatacgccttcaacgtcacaccatacccatacacctcgccattcttacccttaatctcgtcacgatcaatcaactcaacctcagggaaatagtagcgaataacctgatccccatcaacaatatccatcaacagagcgtgcacgccagtggtggcaccaggagaaatatcgaacgaacccgaatcggctccggcagtaaccttcgactgccaaaacagctcgataacctccttcttagactcaatcagctggaaagaaatctcgatagaagactcagtagccacagtgcgaacaacatccgcattctgccaagccttcaaatcatccgttttacgctcaggcttaatcttaaacccatcatcagacagataccccaaagctgtaagcccggaaggaaccgcctccacacccttaatagtatcacccgcatgagctttaccaatataaacgtcacccgtaacagcagagcgaacattagacgctttacgtgttgcagccatcacaacccccaaaaaacaatatcaaacaaaaaacaaacaacaatatcaaaacaaaacgtttactcagattcggcaggcctgcatatcagctcaaaaagcgaatacacatcaaaacgtgcaccatcaaccaccaaatcagggccagtagaccgtttacagtacaccacagggtcaccgtccacaccgtcagccagaacagcctcaacacgacgcgccaaagacatagcccgatcaggcgtatcagaaaacacgttcacccgcaaaaacactcgctcacgaacatgcaactgcgggccaccatcaagagccaaccaaataaggtcaccctcaaactggtcaggcaccgtcccagtacacggtatatcggacagccagccatcatccttgagcacgcgtttagcccagactcttgggtcaccgtaaacgatcacgacgcagccccaatcgaacgagccagcgtgccatgcttcgcctcaatacgcttcccacccttataggtggtgccaatcctcgccacagcctcaacacggtgaacctgcacctccgacgacaaccctgcacgatactgggccttatcgaaagcattaccgcccacattcgccgaggctgcacgcttgacacgctcaccacgctcagccaacatgccctgcacaccaggagacttcaacacctcacgaatacccgacaagttcagcttcacattcacatcctgagccacaaccgatcagcccttcttacgcttcacatgaatctgcgtaccagcatcccagccagacatcggatgatgccacaccacaggagacccgtcagcctcccacacaacaccccgaatacgccaccggcaacgataatcagcacccacaacaggctgcttgaacagcatcgaccaatgctcatagtcagagtcacgccccgcggcctcatcctcctgcgacacagtagaatagacgaccacgttatggtacacggtttctacaggatgcccccaatcctcaaccttgtcaccaagatcatcgacacgaacagtcggttgaagcatcacaaccgtttcaccataaggaaaactggtcatatcatatctcccacaaagggccagcgtagccgttaatattcgacccgcacgagcaaccctcaccccacaccgtggaacacacctcataatgattcacactactcctcatggtcggtgtaatagtgaacgctttaccagccccaccatcaccctcacacaacttcttcaacgcggcaatctcagaaggccacaacaaattcgtgggagtattagaccgtgtagtctgagcgaaaggacccgcagactcatactgcacctgacccgacacgccagtatcattccagcgcaacaaagccctgcgcagaacagccttagcggcatccctgtatttgaaatccggtttagcgatacagggggcgacactgacagcaacagcctccacatcggcgatcatcgcctcaagcttatctttaggaatatcggcgaaaggctcaatatcctcaggcctcaaaatgatacccatcaacaccaccccctgcacacagcatgaacattatcgcaacaataaatcagttctcagacggcgtattaggcttcggggcagccttctccttcacaacagcaaacgaatcaagcgactcgatagccacatacaacacagcctcggcacgaaccataacctcgttatggcccttaagatcgcggccagtctgatccggatcgccatactcgatcagctcgatcgggtagttacgctggaacccccaatggacacgagagaaatcaccaacaatagccttaacaccagaggcaggcgacatctccggggcacccgaaacagtcgaagaagcaccaacattcaggccacgccaattatccaggccagcaaacccggcggcaggatacatcggctgacccgcaagcggagaccccttcggatacacctcagtagacagggcaaacgagaacgccggatccaaagcgacaccgttaggaacctgcaaaccagcaccagcaatcaaaccaacagccttaacaagatcagccgtagcggaatccgtggcatcaaccgtcttcgacgtcttatccagcgacaccttcacagccgtggcaggcttacccgtagccggatcaacaccatggaaagcaatcagatccacagcgcgaccaatagaagcgcccagagccggcgaaatcagatcctgaagcacacccagacggtaatcggcgtcagcccacataaactcgtcagagacacgctgctgcgtcacaaccttaataggctgcgcagtaaacgcagaaacatcaacgctagcggaaggcttaacctcgccctcaccaacaatcttggcgcgaggaacaccactaaacacggcacccttaacagggccaaaaatagtcggctgctccggcgacagcttcgccaaaacaccagaatcgatagcacggtcacgaaccgcactaatcatagaaccaggaagctcaagcttccctgcagaaagaaaatcgtcagccatcacaaatcatctcctagaattattgacaagagcatccacaaacgcgacaccctcacgtcgtttaacatcatcaacgggggcactccccgcaagacggcgcacacccgcgccaccactactatggtcgatcaaacccttcaaagctttcgcagactccaccagtgcttcacggtcgtcgccgtgcaaaaaagctacagcatcagctgataggccacactcggcagccacatcacgcttcacaccctcaagaacaaactcgttaacacgaccctcgagttcctcattcttgcggcgaagatcatcaatcacagaccccgcatcaccattcgaggcgcgaagcttctccaactcggcgaaattacttttagcacgagactcccacttacgggcctcagccttccaatccgtgccagaagaagactcctccttcacggaaacatcaccggcatgatcatcgccggcagcctgcccatccttctcaacatcaacaacgtctccaccctttccgggctcaacagcatcattgtcaacattctgttcctcaacactctgatcggccatagcctaaccctatactccttgcggaaaacaacacaacattgttgacccccgtgcgggagacaaccctgtgcaccgataaccggcggcacacaaccggaaaccatcatctcatgtcgccaacagtacgcatagccttcaaaatattgccaggcgactgctgcaacccatgatcatcaacccactcacgggccttctcatacgtcctctgatactcggcatcaaccctatttggttcccaagggccaacaacctcaaccaccgtacaaccacaatgatcatgatacttcgaaccaaacggacgcttaccaccacgcttatgacgccgcgtatgtccagtagtaagtgccctttctttggtcgtataatccgacctcgtagccaacatggcacaaaaagcacacggatcaccatccgtcacccgacgccaagacctgccctgcgcacccgccgaccactcaaccgtgtcacggccagcattcatgacagcccgatcaaaacccgcagccatcgcatcaatcgtatcattcgccctatccgggtcactctcaagaatcttcatagtcgaaaacgacctagccaaagccgccgcagcatcaaactcgtcatacacaatcagacccggatccacaccattcaaccggcgaaaatccgacacaaacctggcagccaacgatgccgaaccatcatggccggcacgctccaactccacacacaaacgcacatactgcgtgtcactcatcttcccggaatgccacaaacgacccaactcggcataatacccagcgtatttcccggcaaaacgaatcgcctgccgctgatactcagtcgcagcaagcctcgacatagcccccgaagccatcgcctatcaaacctcgttagtttgacgcgatatagccccagccagcgccgccaacggatccgcagactcggcgcgatgacgcatcacagcctcaacctgcacatcatcaaggcccagcatctccaacaccgtccgagaatccgcaggcaaaataccggcaccaacaagcttcgtcacagcatccgctgtagcagccctcgtcggggttgaagcgtcacgcgaccgcaaacccacatcgccaaaaaaagcagcctcatcaacacgagcatccaacgccctcgcagccaggaaaccaaccgacaaccagccctgaccaaacgacgtctgacgccgctcagcccgcttcacaagccgcgactcctcagcagccaaagcctccccactaggcgggttagacgtgataaacccgaaatagcgttcaggaaccgcagcctcacccgcagtcaactgcgccaacagccgcatctgatccgaatacggtgtaggagaattcacaggaaacgaccccacattcggggtgtcaccgtcatcatccttatccacagcccacacagaagccatcgacaggacccagccaggctgcgaaaactcgtcagccgacacacccgtaacccaacgctgaggataggcatagaagtcacgattcacagactgaccaagcaaagtcctaaccgcttcatcagtgtaagccctgatcgagcgggtaatctccgaacggccatcaatcctagacgtcctgcgacgattcacaacaggcaccaacggaaccgcacccaacacattcggtatacgacccgtctcaacccactcacggctaccccgccgctccacctgaacaatcacatcaggaagcaacaactccgcctcaaccacctcaggatcacacgtctgctgcaccacaaggccagcatccaaacgagacccatcggcagaaaaccggccagtacaattcttcggcgactgcggacgaacagaaacagtgccatcatcctgggggataacagccacaaacgacaacccaaaaatcagtgcatccaaatgcacatcacacgacgccgtagcaagccgattcgcagcatacacaccatccaggccgtagccgtcaccattcgtccagccaagccaatccagacgctcctccaaagcatccacagctataccaggccacgacaccacagtctgcacacgctgcaactccggaggaatggccacccccaaatcacgcacccgattcgaaccctcatagtagccctcaatacggcaatgccacgaagacaacctttgaatccgatcaaacatgccctcaatcaaagccaactcatccgagttcataccacagacacccgcttcctaccaccacgatcacgacggccacgcctagcctgtttagcccccataaacgccaaagacacagcctccaaaggaacctcagaaccatccttaaacgaggaaccccaaccccacgtagaccctttacgcttctgcacagccgacctcacagcaatatccaacatgtcacgcctcgaatcagccctagggtgagaaatattcccagaccttacaccttccaagaaggcttgacacgcctccacataagtgccagtatcagcaacaatcacgccacggcccggaacaccacgatccgtcaacgccttctgcaacaacaccgcaccagacccggcaaccatgacccggtcagtatcaccccaacgaaccgccaaccagtcagccaaccggcccacaccatcaacaatcgtccccgacagcccatcaataacctcaacatgaacaccagcatcagtccggccagcacccgccaaagcaacccgatccccagaacgagaaaacgagacaccaaacactttcccgccaaccagactcgcctcatccaccgcagactgagcccacttatcagcaggaaccaccgacacagcagactggccacgatcccaccagccaagacgctcccgagcaaaacccgccgcagacatcgactcatgctcatcagacacagtcccaaaattcaggcgccgacccaacgcaggattcgtatcccccgccaacttccgccacaacctcgatagatcatccggaaccgactcgtcaggaatcgaaaactccgtccacgcaatccgcttaccaccagacaaagcctgaccgcgaagacgcaacaccacagacccgtcagccaaaggcccaggcggcgtaccaaggaaaatctgctgcggatcacccgacggggcagcacttaccgtaggaagcaaagcctccaactgctcatcgctcagctcctgagcctcatcacacaccaaatcatcaaccgtaaacccgcgagcagaaccccgactgcgggccacaaactccaccgaaccccaacccggacaaccacacttacgctcaaacgtggcacaatccgggtgatgcaacacaatagcctcctgaccattcgtcgcccgaatcgacttcaccatacgaaacaggtcaggaaactgccgctcattctcaaaaaacgacctcaaccgcataaacgccttacgagccgacttcaactcgtgagcagtatgcaaaatccggcgaccctgaatagtcgccttaaacaaccccacaacctccaaaatagcattcttgccattctggcgaggcacaaacaccccacacacacccgaagcaagcctgccattactaccgacagccagccaatcatccaacacctgctgctgccaaggatcaggcgtcaacccgtaagccctaccaagctccccagcatcaccgccagcagacaccgaatacgccgcagccacccgatgacgaggcacctgagaacccaccatctgagacatcaagcacccctacgcttcctataccggtcaatcgtcgccaccgcagaacccccaccacggccaccagacaccacatcaaccgaataccgatccaacatacccataaaagccttcacatgagcacgaagcgaagccaccaaatccgcgcgaccctcacgccacacacaatcatgaatcaccgcagcatccatgagaaacaaccactcctcatcagacacgtactgcgcgcgactatcctcaccccacacacgccaccaacgacgcgtctccccacaccaatcacgactatcaggaagctcaggctgcacaacactcaccaccaacacaaaaagtcgacaaacaggcaaatccacaaaagggagg

SEQ ID NO: 89 - DNA, 11262 bp, Pahexavirus sp.
  source 1..11262: mol_type = genomic DNA
ttcaaacgtttgttgctgtgcttggggtgactgcgggtgtgacttatactgcggagtcgtttcgcggtttgccgtgggagtctgccctgattacggccggggttgcttcggtgctgtcgattgctacctcgtttggtaacccgtcgtttgttgccggtaaaccgaaaacgacgtctgttgcggatgctgggcttgttccaccggatgatgggggcttggttgagccgcacatggttgatgtgtcggatcctggcatgatcgagcctgtagatgatgcggatgttgccggctatgagcctcggcgtgcagccgagtctgaggttggcacggtagggtctactgttgcataattgaatatgtgtgtgccccagcggtgctgccacgatcgtgtggtggttgccgctggggcactctttttgtttatgcgatatggctatgattcgttgtcgtctatggtttcttcgagcatctgatacgggtggaggcaggcggagatagtatcgttggcctggtctagaacgttctggccgataacatttttgtggttgtcgcggtggcagatgattgactgcatgatatcgtcggcctccgcttgcagtagtttggtttggtatgcgattcctgccagccaatctatggcttcctggcttgcccgtgtgtcgtctggaatgccacgggtgttgctgttgtttgggtatcctgcactgtcgcagtcccacaggatttcgctgcactcgtctagcgtgtcctggtcgatagcaaggttgtcgaggctgacttcgttgacggtaaggttcacgttgtcgagtgagatggtacacggtactggttttcgacaccgtcaacaatgttttctagttgttgcatgttggtgggctgttgttggatgatcggtgtaccgctgttttgagggcggtgtgggggatgttggttgtgttgttcatcgtgttatgccattccttcgttatcgtctggcatgtagtatgtgctgtttgcgtactcggttaacgtcatcagtgtttggtctgcccactgtttcacggtttgtcttgtcacacccaatcgttgggctgccaccgaataggtttggtcatacccgtatacttcacggaacgctgccaacctagctagccgtttccgctgtttggatggctggcaggtgagggtgtagtcgtcgatggccagctgtaggtcgatcatgctaactatgttgttgccgtggtgttggggggcggttggtgggggtggcatgccgggttctactgagggtttccatgggccgccgttccagatccattgggctgcttgaataatatctgcggtggtgtaggtgtggttcatgtgtcaccccctgaacaggttgtcgaggttgtctgggctgttggtgttggtggtgtcgaagcgtccgacgcagaggcagtagtcgtacatgagtttaataatgtgttggtggtcgccgaggtaggtgtttccgctgatactgtaggtggctgtgccgtctttactaatggtgtatttggcggtgatggtttcgggtgtttctgtgttggtgatgattgctgtggtggtggtgcctacggtttggaggatggtggtttgggttccgtcgtcgaggatggttgtgaccattgtggggttctccttttaaatgcttgtttggttgtcggctagatgaataatatcggataaaggtttcggttggtctaggtgttgtatggttttgttggctagccgtttggctaccctgtagcacattttggtgtagtgtttgttgtctaggttgtggtattgttcccgcaccgcaatatatagtagggagtcttggtagaggtcgtctgcactgattgcggggtagtgtgcggctgttttggtgcatgcccggttgagtgtgcgtagatgatggtctgtggcccacacccacgatgcggtggtggccaggtcggcttttgttggtcgtctgctcatggcactatttcatctcgctatctggtagttgtttggtgttttgttgtggatagtgtagcacactagtccggggttgcctgtggtgcctgtgcggtgccggtaccagacggattctccttccatggatgagcattggatgaatgtgcgttgtccttgctcggagatttctaggtggtgccggtgcccggccatcaggatgtgggatgtggtgccgttgtggaattcttggccgcgccaccattcgtagtgttggttgttgcgccattggtgtccgtgggcgtgtaggatttgtgtgcctgccacgtcgacggtggtggtcatttcgtctcggctggggaaataaaagtgtaggttggggtattggttgttgagctggtaggcttctgcgatggcgcggcagcagtccacgtcgaaggagtcgtcgtaggtggtgactcctttgccgaagcgcacggcttctccgtggttgccggggatggatgtgatggtgacgttggcgcagtggtcgaattggtgtacgagttgcatcatggccattcgggtgagcctgatttgttcggtcaggggtgtttgtgtgcgccaggcgttgttgccgccttgtgacacgtatccttcgatcctgtcgccgaggaatgcgatgtggactcgctcgggcttgcctgcctgttgccagtagtgtttggcgactatgagggagtgtaaatagtcgtcggcgaagtgtgctgtttctcctccggggatgcctttgccgatttggaagtctcctgccccgatgacgaaggctgcagtgctgtagtcggtgtgggtgttgtcggctggttttgggggtgtccattcggctagtttgttgacgagttcgtctatagggtaggggtttgttgcgggttggtggtcaataattttttggattgatctgcctgtttctccgttgggaagtgtccattcggagatgcgtgtacgccttacggttccgttggcgagaccatcgttaatggtgtcgatggcgttgtcgtggtcggctagttgtgtgaggagccggtctatgttgtctatcatcgagtatcctcttccttttgtggggtggtgttggcttgtttgcggcggtagtctttgatgacggtggcggagatggggtatccggcttgggtgagcatttgggctagctgtgtggcgggtatggacctgtcggcgagtacgtctgcggctttgttgccgtagcgttggatgagggtttcagttttggttgccatggtgtcctaggggttgtgtggtgggctgccatcctgtgcggcagtagccgtcgtgtcctggtttgcgtgtgcaccacgatacggttccgtctgtgtggttgagtggttagccgcacatgacgtcccggaggtgctccggcagtgcgccttcggtctggttgctggtttgtgtgtcgaagagtgttttctggttagtaaaatgctcagatactgttccgttgtggacgggtagtatccatgttttccattgctgctgtagcctggtgttccagtggaattgtttggccgcgttcatggcttgtttagcggttttgtagtagccgacgagtatgcgctgatgtggcttgtcgggcgggttttggcctcgccagtattgcgctgcgacggcgtaccggttgctggctgtgaaggcgtcccagcagtattcgataatgtgctggagcacattatcgggaatgtcttgtgcttggttttcgtcgagccactcgtcgacaataatgttgcgtatagctagcttgtctttggtggtgggttagaacgagatgctcacgatagtaccggctggtcgtcttgcatgaactggttgaaggtgttgttcccggcgtgttgggcttgtgtgatttgttggtcggtccagtctgggtgttgctgtttcagatagtgctagtggcacgcattgtaggtttcgtcttgtagccgggtgagatggttttcggtgatgatttgtttccacattgtccatgacacgtctagccggtccaatatttctatggctgggatgttgaattggtcgaggaacaggatttcgtgggtgtagtattccttctcgtactggtcccatccgcttcggtgcctgttgggcttgtttttggggtaggcttcccggcatactttgtgcaaatgtttggccatgtcgtcgggtagtttaatgtcggggttggcgcggatcatggatcgcatcccgtcataggtggtgccccaggtgtgcatgatgtaggtggggtcttctccgtcggcccattcttctgcacagatagcgaggcgtatccgcctcctggcagcttggctggtgttgcgccggtcggggatggggcacgtgtcgaggggatccatgatgctttttatgcctttctttgttggggttgcttgtgtggttttattgtagcactgtgtctagtgcttgtgtcaaccctgttttgccggcctgcagataggtgtctgtgacatcaccgagggtgaggggcacatgggtggcttgggggagtgcggtttggagggtttgggccatcttgtctcccgcgggatcggggtcggaccagatgtagatgtggtcgtagccttcgaagaatttggtccagaaggtttgccacgaggttgcgccgggtagggctacggccgaccatccgcattgttcgaggatcatggagtcgaattcgccttcgcaaatgtgcatttcggctgccgggttggccatggcggccatgttgtagatggagcctgtgtcccctgccggggttagatatttggggtggttgtgggtcttgcaatcatgctggagtgagcagcggaaacgcatttttcgtatttcggctgggccgccccagacggggtacatgtaggggatggtgatgcactggttgtagtcttcgtggcctgggatggggtcattgtcgatgtatccaaggtggtggagccgggctgtttctccgctgatgcctcttgctgagagcaggtcgagtatgttttcgaggtgggtttcgtagagggccgaggctttctggattcggcggcgttccgcaatgttgtagggttgtagtgagtcgtacattcgggttctctttctctaattgttgtttcagtttggcgaggcctcctccgatgccgcatgtgtggcagtaccagacgcccttgtcgaggttgatgctcatggagggctggtggtcgtcgtggaacgggcagaggatgtgttgctcgttcctggacggattgtagcgtatccggtaggtgtcgaggaggcggcaggtgtcagaggtgtgggaggagctcgttgagggttgataccacataggcttccctccatggcttgttgcgctgtttcatcactactagtccgatggtggattgtggctgccggtttcggtgtgtttcgtagtttcgtgcctcttggctggcttgtttcacgaattcggcgagatggggctgcccggctttcgcttcgataacgtaggttttgtttccggtttgaaggatgaggtcgccttcgtcttcgcggccgttgaggtggaggcgttctatgtcgtgtccggtgtcgcgtagctggtgcaataatcgtgtttcccattctgcgcctgccctgcggttgcgtgcctgctgtgaagccatcatagtcctttgtgtgttgtggtcatgttccatggctgtttgtcgacgaggggtccgaagaatgtgtattaggggtaggctcgtagccgctcgtatcgggtgccgtcggggctggatttaccggtgcgctgttttagcactgcgatgcgtgcctctgccggtatcgataggccgttgccattatcctcgccaccatacaatgatactccgagaatgagttgtggtttttcggagaggccgtttttgatttctcgccgggcgggcgggtgttcgatgtcggagccggttttgtctgttgcgtggtgggtgacgatgatggtggagccagtatccctacccaatgctgtgatccattgcatggcttcttgctgggcctggtagtcggattcgcagtcttggatgtccatgaggttgtcgataacaatgatgggcgggaaggtgttccacatttccatgtaggcttgtagctccatggtgatgtcggtccatgtgatgggtgactggaatgagaatgtgatgtgttggccgtggtggatgctgtctcgatagtattctggcccgtagttgtcgatgttgtgttgtatttcagcggtggtgtgttgtgtgttgagtgagatgattcgtgtggaggcctcccagggtgtcatgtcccctgatatgtagagggcgggctggttgagcatcgcggtgatgaacatggctagccctgatttttggctgccggaccgccccgctatcatgacgagatcccctttgtggatgtgcatgtccaggttgcggtagagggggtctagttgtggtatgcggggcagttcggcagctgtttgggaggctctctcgaaggatcgttgtagagagagcatcggaaccttatctatctatcggttggatgtgtattggtggtcagatggagtcgatgtccacatcatcactaccagtggtgttgggctggctgtctcgccgatcaacatatgctgctacgaggtcgtagatggcgtcatccaatggtttgagaataacggcgttgaacccgtttttggtgcgcacagtggctagtttgaaggcctgctcttctcccaggtaggtttcgagttcgcggatcatggagtgtggccggtcgttgttgcctcgcgccttctcaatgatagcgttggggatggtttctggggtgccgttgttgaggtcgtcgagggtgtggaagattgtgacatcagcgtagatgcggtctgcggtctgtccgccgtagccttcggtgttgtgttctacgtcgcggattttgaaggcgatggcggtggcgtcctggtttcgggacgggttgaagaaggtgctgttgctgttgttgcggtagttggcgagtcccattatcgtatcctttactgttgtgtctgttattgttggtttctgttggttatcgggtgaggctgtttcgtttgctgcggaaagcctcggaaacgtcactgttactggtgatgatctttttgtactgttttagaaggtcggctagctgtgtcttgcttgttgcattgttgattttgttgatgacgatggtgttttctttggatgcgatgttgtccacgtagtctttggcggcctggttgtatcggtcttggaggatgatggatgcgctcgctacgagtgttgctagatcccagtctttggacacgtcatcgtttttgagtccgcccaataaatcgatgattgcttgttttgtctgctctgctgtgtctcctctgatgaccgcccatggtgcagcatagtctccaccatatttgagtgtgatagtgagtcgatcattgtctgtggtgtgctcttctgtcacttgttttccttttctttattgtctgtttggggtggctgtacggtggtttctatcgggtatctgtacgagtttttgccgtctacagcccagcaggcgtctcgtacggggcatcctttacagagtgttgtgacgtgtgggacgaagatgccttgactgattcctttcattgcttgactgtacatggatgatacatgcaggtatgtgttgttgtcaaggtcgtagagttcggtggatgtgccttgtgttggggacttgtcgtcgttgcggctggtggccggcgtccaaaacatgccttttgtcacatcgttgccgtgttggttgagcatgtacctgtatgtgtgcagctgcatactgtcggcgggtaggcgtccggttttgaggtcgaggatgaaggtttcgccggtgtcggtgtcggtgaaaacgcggtcgatgtagccgactatttttgtgtcatcgtcgaggatggtttctaccgggtattcgatgcctggtttaccgtctaggactgcggtgtggtattgtggatggtttgtgcgccactgtttccacctgtcaacgaagatgggtccgtagatcatccaccagtcgtagtcttttttgttggggcctcctgtttcgcacatgtttttgcacaccctgccggagggtttgatttccgtaccctcggattggacaagggcgacttgggtgtcgaaaacattgttgaaggatgagaggttgtcgggtatttcggggtattcggcgggattgtacaggtgtaggtcgtattgttcggtgatgtggtgtatggcgctgccggcgatggtggcataccatgtgtgataggtggctttgtagccgtgttggaggcgccatttttctccgcattcagcccactgcgatagtgaactgtaggagatgtgacctggatggtcaatggttttcgggtattgtgctagaggcattacttgtcgcttttgttccatgggttgcgggtgtcttggccggcattgtgttgctgataggcgaggagtgccaggcagtgccaggcagcatgggccaggtggggtagcccggattcataatcgaggttgttgccttgctgccatgatagcagatggcggtagagggcgtcgacgctgtggctccacgggtatcctccggtccagttgttgtcgccgtatttggtggcgccgtagcctgccacggagcctagatcgtgcaaggctgcggggtcgatgagggagagcctgcagagtttcaattcttttcgggctccggtgttggggtcggtgtacatgcgggttggctcatccatggggtgtgtgctccttaagtgtggggttactggttggggttgtgggctagtgctacggcgagaataatgatggcgagggtttcagcaataagtatgggtgttgtgatcatttagtgtctcggggattgttggtgagtgtggatgcacccaggagggtggcgagggcgcatgcggcgatgatggcgagggctgccttgtgtggggtgccggttgcgtacatccatgtgatgatgccgccttggatccaggcgaggctggtgaagaacgtttcgtagctgtgtagctcaatgttgttgttgggtgtgttcatgcttgctcctgaagaatggtgttgatggttttgtaaatgttgtacaggtcggcttcgatggtttgtagctgtttgatttggtggtcgaggttaatgtgtgggttgagggtgttgatgcgggaggcgatgtcggtggctgtgcgtagtgtgccgccggtgtggtgaatgatgtgtgctgtgtcggcgaggccggtggtgacagcgtagtgggagaggagaggcatagcggtccttggcgggttactgttgcgggttgatgttgaggtcggtgacgttggggtggtcctctgttcctgtgacgaggcagtggacggtgactgggagtttggatgcgccgggctgtttcgcggttgcgccgtagacgatggagaaggtgtctttaccaataattttgtggagttggaggtcgatgtcggggttgccgttccagttgacaccgtgtgcggcggcctgttgttcggctttgcggttgcaggtgtgtgctgccgtgatcatggtgagtccggtggcggtttcttccccccttgcttgggcttgcttgtgggctttggcctgctcggcttgtatggagcgggtggcggctgcctgccgtgccgctttctcggctttgcgctgttgggtagtcttgggggtccattcggtgttggctgtggtggcctgtggggctggctgtgaggcgagtggcggattgtcgtctggggctggcaggaaggatgctgcggcgatgatggcggctgtgattccggcgatggtgtagccgtttttcttgttcatgttttgtgtcccctttccggggtgttgttcgttgctgacatgattaatcatggtgtgggcggtggcctgtgtcaaggctgcgctcaacgattgtgagcgatccttgtgtggctaggggttttatccttgaggtatgacaggtcacgtcctgtagtccagtagccgagacgattacgcttcatatccttagcctccatctcgtccacggtgagacacctgcgacgactggggccttccttgactccatgatcgcctgtgcggtgcatgtcgccagagcgagtactagtgaatgtctcgtgacagactgtgcagtgttctggtcggtatccggtgattgtgctatcgcacttgtggcatgtccattgcatgattagtcctcttttcgtgttttaagctgtgactcggtgggttagagcgattttcagcccttgggggtatgattatataggtcaggtatttctaggcgattctaggctcagtttgtgtggttggggttttatcgggcacacaaggtgagtagatggcctacgttgatgcgggtcacattccagtagagttgtgtggcttcaccgccggtgagtggcttccactcgtggtggctgaacacggtgccatcggaggcgatgaatgtgtcggggcgtagcttgtggagttcaatctctacgctctgccggtaggcttcggcgaggccctcaaaatccatgtggtcgcaggagaggttttcgaggcgtgtcaggtcgaagggcgtggggcagtcgtagctggcgggggtgtagagctgggtgaagtggttggcgatcttctgcatgacgggttcctttctggtgtgtggatggtttttatcgtgtggcttcggcgatgatggcgtccacatcgattgtgtcgatcatgtcgtggagttcctcagtctcatctggggtgagtggctgccagttgcgtggcccatacactgcaccgtcgagagtgatggtccacaggggtcggatgagtcgtacggctccttcgactttggcacggtataggcggcagatgatagacgtgtgggtgttgcctatgtcacatcctgccaggtgtgcggggtggagtgggttgatttctgtctgcccatagaggctagtgaaggatggtgtgatgagtgtgccatccatggtgtgtgtgctcctttcggtggtgtatgggttgttgtggtttctagagtgtgtaggttgcaaccgggagtcaaggctgcgctcattcggattgagcgtttcatgcgggtgtggcatgggatgtggcgtatctcacttaagcctttattgcctctctctgcgtctcaaatcttctaggggtgggattatgcagggttgacccttctgatcgattctagggcccttctagggcgtctcaggggtatgtctgggtgatagcaggtccggtagatgatctagcgagtcaaggtgccaagctgagacctaagatctatcat

SEQ ID NO: 90 - DNA, 17982 bp, Rosenblumvirus sp.
  source 1..17982: mol_type = genomic DNA
tatgtatctattgacttttattcaaaattatgatttgtatttaaaatctaatttcttctattaaatagtatttttaaattatttaaactttttaagaaaaaccattgacaaaacttttaaacgtttgctatactatgtatgtaatcaaatcaaggaggtaacaaaatggaaaatgtacaacctttacaaacttacattttaaaaaatggtaatatagttattgttatgggtaatacatcaacttatgaattaacattatttgtacttgaaaaggacgattttgaacaattagaccataattcacctaaaaaaatcgttgatgaattaaggaatgaaatcaatgatttaaggagtgataataatggttaatgttgataatgcacctgcagaaaaaggtcaagcatatactgaaatgttgcaactattcaataaacttattcaatggaatccagcttatactttcgacaatgcaattaacttagtatcggcttgccaacaactattattaaactataatagttctgttgttcaattcttaaatgatgaactaaacaacgaaactaaaccagaatctattttatcttacattgctggtgatgacccaatagaacaatggaatatgcacaaaggattttatgaaacgtataacgtttacgttttttagaaaggagtgatataataatgaaacctgatgatattgttacattacgaattaaaggttatattcttcactatttagatgataaaaatgaatatgttgaagaatttattccacttcatgagtatcatttatcaaaaacacaagcaaaagatttattacctaattcacacaaacttttatccactacacgcacaacgaaaacaattcaagtttattacaatgatttactacaaatttcaattccagaaagcaaataatttaaataagaggagaaataaaaatgacaaacgtaaaagatattttatcaagacaccaaaacacattagcgagatttgaatttgaggaaaaagaaagagaatttattaaactatcagaattagtagaaaaatacggtatgaaaaaagagtatatcgttagagcattattcacaaacaaagaatcaaaattcggtgaacaaggtgttatcgtcactgacgactataacgtaaacttaccgaatcacttaactgaattaattaaagacatgcgtcaagacgaggacgttgttaacattatcaatgctggtgaagtgcaatttacaatttatgaatatgaaaacaaaaaaggtcaaaaaggttactcaatcaactttggtccagtatcattttaatacaattttataggggatatttatcccctatttttatgaggtgctaaacaatggaaaaaatatacactgccgtattattatacaatgtatcaattaatgaaacatatgaacatgaaattgaacaattcgaaaaaataaataaagttaaggtaatatatagttattttgacgcaaacttttacaaaaaaggtgcatataatctttgtgtaaaatacattaaggagatataaaatgaatattacaacaatattaaacacaaaaaaattaattaattatattttagataatagagattgttttatgaataaaataacaaaatttgaatcactaagtggaaaatgtgttgtttttgttagatacggtgaaatttctattgaatactatgatagtgatacaaaatacaatgatttatttactttagacattgacgttgatgttcgtacatatagttttagttgtcttgaggttttttatcgagaacatttaaacccattatataaaaaagaagtttttatggattgtactattgatgacgtattagaatatttcgagaaaccaatagaaagtaatataacaataatttttcaaaacaaagtgatatataataacgggaacgtgatagaacatgactaatatattaaacatagctattattttccttttagcatttttaattacacttgtaatacttatgacaatgcatatacgtgtgtcatttggtgttttatttactacattgattatattctacattatctttttagtggttatatatgggttatatggaggtcgttagcaatggttagacatacgtccgaaatggataaatggaaaaaagaaagagacgcaagaaaagagcaggaaaaagaattgtttttaaatgattttagtactgttaattttaaatttgatgataaagatttacaagaggcgtacatagacacatggaaacatttcgcacatttgccctattttccaaaagaaagaaacgtgtcatatgcaaatgccgtatcattggtaagaggtaaaagacatgaacaattaaactatatacttgaaatatataaccgtaaagatgaatctaataataaaaacgctaaaaaacataaatatgctttatatgaattacaagctaaaaataataattcttctatgtataaatatattaaagaaattgacactttatacaaagaaattggtaaatcagacagaccagtgactactattgatgataaagatgtgaggtataactttttatattatgcaacatttgaagagtaattttaatactgtaaacgacatcataaactattataaggagcaaaaacatggtgaaacaaaatcgtttagacatggtaagagattatcaaaatgctgtcaatcatgtcagaaaaaaaataccagataactataatcaaatagaattagttgatgaactcatgaatgatgatatagactattacatatctatttcaaaccgttctgacggaaaatcgttcaactatgtttcattctttatttatttagctataaaacttgatattaaatttactttattatcacgtcattatacattacgtgacgcttatcgtgattttattgaggaaatcatagacaaaaacccactattcaaatctaagcgtgtcacattcagaagcgctagggactatttagctatcatctatcaagataaggaaatcggtgtgattacagatttgaatagtgcaactgatttaaaatatcattctaactttttaaaacactaccctatcattatatatgatgaatttttagcacttgaagatgactatttaattgacgagtgggataagttaaaaacaatttatgaatcaatcgaccgtaaccatggtaatgttgattatattggctttcctaaaatgtttttactaggtaatgcagtcaacttttcaagtcctatattatccaatttaaatatatataacttattacaaaaacataaaatgaacacatcacgactttacaaaaacatttttttagaaatgcgaagaaacgattacgtaaatgaaaagcgtaacacacgggcattcaattcaaacgatgacgctatgactactggcgagtttgaatttaacgaatataatttggcagatgataatttaagaaatcatatcaatcaaaacggtgattttttctatattaaaactgacgataaatatataaaaattatgtataatgttgatacatttaatgctaatattattgttataccttatacaaaacaatatgaattttgtactaaaatcaaagatatagatgacaatgttatttatttaagagaagatatgttttataaagaaaacatggagcgttattattacaatccaagcaatttacattttgataacgcttactcaaaaaattacgttgttgataatgatagatatttatatttagatatgaataaaattataaaatttcatataaaaaatgaaatgaagaaaaatatgagtgaatttgaaagaaaagaaaaaatatatgaagataactatattgaaaatacaaagaagtatttaatgaaacaatacggcttataaaaggtgtgtaagattatgggattactagaatgcatgcaatatcataaacatgaacgtcgaatgattttatactgggatatagaaacattagcgtacaataaagttaacggacgaaaaaaaccaaccaaatataaaaacgtaacgtattcagtagcaattggttggtttaatggttatgagattgatgtagaagtatttcctagttttgaatcgttttatgacgcattttatacgtatgtgaaacgacgtgatacaatcactaagtcaaaaacagatattatcatgattgcacataactgtaataagtatgacaaccattttttacttaaagataccatgcgttattttgataatatcacacgtgaaaatatatatttaaaatctgcagaagaaaacgaacacacactaaagatgcaagaggctactattttagctaaaaatcaaaatgtgattttagaaaaacgtgtgaaatcgtctattaatttagacttaacaatgtttttaaatggatttaaatttaatattattgataactttatgaaaacaaatacatcaattgcaacattaggtaaaaagttgcttgacggtggttatttaacagacgaccaacttaaaacagattttaattacacgatatttgataaagataacgacatgtcagatagtgaagcctatgactatgccgtaaagtgttttgctaaactcacacctgaacaacttacatacattcataatgacgttattatattaggtatgtgccatattcattatagtgatatatttccaaattttgactataacaaattaacattttcattgaatattatggaatcgtatttaaataatcaaatgacgcgttttcagttactcaatcaatatcaagatattaaaatatcatatacacattatcatttccatgatatgaatttttatgattatatcaaatcattttatcgtggtggtttaaatatgtataacactaaatacataaacaaacttattgatgagccttgtttttctattgatatcaattccagttatccttatgtgatgtatcatgagaaaattccgacatggttatacttttatgaacattattcagaacctacattaatccctacttttttagatgatgacaattatttttcattatataagattgataaagatgtatttaacaatgatttattaattaaaatcaaatcacgtgtattacgtcaaatgattgtaaaatactataataatgataatgattacgttaatattaatacaaatacattaagaatgattcaagacattacgggtattgattgcacgcatatacgtgttaattcgtttgtgatatatgaatgtgaatactttcatgcacgtgatattatatttcaaaactattttattaaaacacaaggtaagttaaaaaacaaaatcaacatgacatcaccttacgactatcatattactgatgacatcaacgaacacccttactcaaatgaggaggttatgttgtctaaagttgtacttaacggattatatggcatacctgcattacgttcacattttaacttattccgtttagatgataacaacgaactatataatatcattaacggttacaaaaacactgaacgtaatatattattctctacatttgtcacatcacgttcattatataacttattggtacctttccaatacttaactgaaaatgaaattgacgacaattttatttattgcgatactgatagtttgtatatgaaatccgttgttaaacccttattgaaccccagtttattcgacccgatagccttaggtaaatgggatattgaaaacgaacagatagataagatgtttgtactgaatcataaaaaatatgcatatgaagtgaatggaaagattaaaattgcttctgctggtataccgaaaagcgcctttgatacaagcgtcgattttgaaacctttgtacgtgaacaattctttgacggtgtgataatagaaaacaataaaagtatctataacgaacagggtacgatatcgatttatccgtctaaaacagaaattgtatgcggtaatgtatatgatgaatattttactgatgaacttaatatgaaacgtgaatttatcttaaaagacgctagagaaaattttgaccatagtcaatttgatgatattctttatattgaaagtgacatcggttcattctcacttaatgacttatttccagttgtacgttcagtgcataataaatctaatttgcatatattaaaacgtgaacacgatgaattaaaaaaaggcaactgttaaataacagtcgcctttttcttttgatataacatgaaaaatgtgtacgaaaattgattatgttttgtattttatttactagcattactagcatgttttcattatagcatagttaattaagcaataccactgaagaatacaatattatcaccagcgttatgaggtacaccattaatcaatgtatataatacaacccgtgacggtgccacgtatggtgggacgttatagtttgctactaagaatgaaccatcgtcaaatactgctacaacgacacctgtgtgaccaatgccatatgctgttgcttgtaagtatggtggtttacttgaaaaaccataccctactgttggattatgtgttgtttttgcacctaactttttatatacgtaccacacacgttgaccgtttgttatttgaccgtcgtctgttggttgtcttttaccatgtaattgtgacatatatgcccatgttaattctgtacattgtcctgcattacccgtttgaggaaatatgttacctggtttgtacaagtattcttttttgaataaaggtacaccaattgcttttttatatttttctggtaactgtgcatacgtccagttaccaccaatgacgcgtccacttttaccatttggtttgactgacttaccactaattggtttatggtccccgtcatcatcagtagggtttgaactactatccccactatctacttgcacactatcaatcagtttttttaatgaatcaagtagcccaatcgtcattttaatatgatatgtgttgttaaatgttttttgtaatgtaaaataatcattactaaaaaatttatcactaccaatactgtgtacatcccattgtaatgcgtcttgtactttttttaataattcttgcatggcttgttttgctaaagcgagcagtgaactaccactgtcaccactactaccactgtcagacgaatcactaggtgaaccacctttaccgtctaatttaccaccccatgctaaaatagtatttgcaccgtctaaaaaaggattaccatagttttgtactttattatatgacgctttcaaacctaggggataatatgccgcccaagtagccgctgctgttaatggaatatacgcacgtccgattgtacctgctttcatatttttagcaaaatctgcattaccttttctttgtacgtcttgaggtacaaagtgaacgatgttacctgcgtcataccaagacggttgtcctgcttgttttgattgtgatactaattttcttgcaatgaatttagcgtctgttaaatagtcacctcgtgcagatgtatggttcaaccaacctaaaccagcgctatacccttcatttttttcatatacagcaaaaagagtaggtgacacacctatctcttttactgcttttaatacttgtctgattttactttcattaccacctagccatacattaaagcgtccatacccttttactttagggactaactggtctatcgttaaaccgaaatcatcattaatatacgaatgcgtaaatttatctatcttctcttggtcgttcattattatcacccttttcagaatcgtttttaattactcttaatttatctttaatttgttcaggcactaatacgtccatttcagcacaattttcaacaatagatagtccctcatttgcgatataatagaaaatcgtaatcatgagtaaaccaccttttaattgtaaaatctggtcaatgatgttagctaaaatgataatacagaatatcaataattttttagcaaaacctttcattgattttttagaccatagattattatttttaattgctttagcaaaaccagtaacaacatctataatcatcaaaacaaataaaaaatatagtaactttaaatcacctgcatatatgaacatatgaaatgcttctgtgtccgtaaatcttaattttacctcattcattttatacaccttctctaaatttattatttaacgggttctgtaacattggattacctgaaccgtcattatgccaaaatctcacaccagattctaaaattgcttttaattgttccattaacatagggtcaatgtcacgtatggtatacgtacctgtacattttaaatagttgcatacagtcatgctgttaataggttcaatgaatgtattatagtcatttacttcaaaaccaaacaacatataatatttttgtaaaaatgtaatttctttaggtgacggtacactaattttcatcgttaaaccgttaatgctatttgcaatttggaatgcgtttcccatttctgattctgtcacagatggtggttgtaaggctaaatctttatattctgcctgttgttgtttgtagaaattatattcttcattaaacttaccaaataaagcggttggacttaaattacttgctacacttacagcgtcataaaaacgtgattttgggtcactaccatttaatacattatctatacgacttgtgattaattgactttctgcattacgctgtctattggcttgttgtgattgtcctaaaattccgttattaattaatataggcacttgcgcaaaactattaaatgttatattggtatttaagaatgaacctgtatcaattaatatatctttatttttagcaagtatcggtctatcgttttcagcactgttataatcaactggatatactcgcacttcattatgataaccaatgatggattttgtacgtaacttaacacctgttttttgtgaaattttaccagcgtcaagtaacattgtgttaccgttccagtcataaaattcaatcgtcatgtactcattacgtatcatatgtttaaactcgtcttttttagacaacatcatctcttgaagctttgtgaaacttaatgataaatcgtttaaactccattcttttgattttccaccctgttttaatgtctttaatccagtaattttttcacttgtcttaacgtcctctaaatcttttgtattaataaaatctttaggtaacatttgaaccttttgaaagttttgtgtaatccatggatatgcactcattttatccataaagttaataaagtcaccatattccataacgtataagttgactggcgatgtgatattgtcatatatcgtacctttagacgtatctaagtttggctcttttttcgtaccaaatttctttgataaatcagcgcttgactggaataacactaaattttccaaatactgttgcatttggttatacacatagtttttatttgatacttttaacacatcatcattgttacgtaacatcggcaacatatagttatacgtacgctttgataagtgttgacgttcaatattaacgtttgaaagttgttctaatacattaccttgtgtatacgtcataatagtatcaatcacaaaatatatttttaccacaacatcattcacatattcgatttgattcacaaaagcgtaatagcgtctatcctcaaaatctgataaaaacgtcatgtagttaatcccttgtgcgtcatgccactgcatatcaacattgatttccattctatcacgtataaaattatacggttgtttggaatagtctaatgatttaaaatgacgaccgtttaaaaaataatcatcacgctctttattactattaaaatgaattgtattttgatagtctgtaaacggtgtgttatagaaaaatttaaaatttgttaattttctcatttttacctccataaaaaatagtcgtataaataatttatacgactattataacatttttattcaatgatttgtgtatctattgcaaaacgtttatctccatttgttaagtcactatcgctataatttgatgtaacaaaatgtaattcattattaaagtttaaatataatcttgtattcatcattttattatcaatcgcacattgtgtgtagtgatgtgttgattttaagtttgcgttaatcgtacctaatttaatatcaccgtttttcttaatcccttttaataccccttttaattgtatggttttaacaccattaattgttacaatacgatattgcggtgcgggataacccccgttgctatcacttgcaacaataccactttcaagttgcacatcttgccaacctgtatcattaaattgtaattttgcactgttaattttttgatcaaaattttgttcaatttctgatttagattgtgcaattttagtatctatatttaagttatccacttttgttgataaaacgcttatacttgattcgtttgttgatgttttttgttttaaatcactaatatcattatcatattttgataaatcaatatgaccgtttccgtcaacaactggtctgtcttttaattcttgaataactttttcaatttttgatattttatcattatttgtttttaaagtagcgatgtcagatttaattgaattaatatcctgtgtataatctttttggttaatactgtttaattttgtttctaactcttttatcttatcaaggttggtatttgctttgatgtcattaatggtttgttctaaactttcaagtttcccagaacttgaattttgttttaacttattaatatcctcttgtatttcttgaattgtgttgtcattgttttgtttagattttaataattcaatttgactttctatgtcttttattttatcaagattaacactttttttaacttcagctaattctctttttaatgcgtcaatgttttctgcaccagtatttgatttaattatattaatttcatttgtgtttcgtcctacactatctttagtagcgtttaaagattgtgtaagtgtttcatatttatcatcatactttaacattgatttttcaaattcatttaattgtgtttgatgttgttctaaactttcatttaatatgacatttttttcttttaatgaatcaatgtcttttttattactatcaatcattggttggaatttttttattttctctagaaatgttgatattttttctttgttatcattaattgcaatatcatgatgttctatttgaccactgtatttattaatcaatgtttttaaatcattataaaatgttaatttataataaccagtatcagtacggacataaatatgtccgtctgatgtactgattaagtcattttcttctgttaaaaaatctgctaacctgtctattgtttcaacttgtcttaaacttcttacgattctatcagccattgttcacacctcttatttgtatcgtttccaactaaactcaaagaaaaaacctaaaatacccattatgagaaaaccccccaaggaataccaacactataactattacccgttttaccgttccattttcttactggtaaataataacgtgtaccttgccagttgtaaccaatccatacatacccatctgataaacaaacttcgtcatatggtgtataaccatttggttggaaccaatatccattaggttcacttaatttaggactacctacacgtgcaaatattggtaaaaatccacatgtaaatgttgcattttcatttctgtaatatgtgccatattggttttgtttccattttccgaatgtgtttacttttgatgtttctaattcgttgctgttactagcagaaaatttaggtctaataaagtgtgttacaccgtcataataatgtgttcttattgttgctttttcccaaccgtcaaacccaccacctaaccagttttgctctaaacatgtataataatctaaattaccacttaacacacattgaatatgtccatattgtccatctgtatatacaccaacatcccctaattgtggtttaaagttcggtgtattttcatacaccattgctaaacctttaaagtcattattgattgcgtctttagcgttaccccacatacgaactttaccgtctgtaatgtaatatatataagcaacagctaagtcagcgcattgataaccaaatgctaaatcaaagtccacacctacaccctcatgcttatatatccattcttttgcttgttgttgtgatttcatgaaacattatcctttcttaacccaactatattgacgtttttttgtatctgcattaacgttactaaagaattctttatgttcggacacattagcctctaatgtttgtcttacttcaccgacagcgttaccacttgaaacacgtaaccatgcacccacttttttaatttcttctggtgcgtctctaaacaattccatttggttaccagtaatataatattcaccaggtgtcgtaacgtaagctatccagttattgtattgacttgcttctaaatactcttgatatggtgcgtctgttttgattgttgtccataaaccataatcccattttaatgtaaatacatcgagcgtcataccacgcatgattttaaccatttttcgaccagtagaaaaacgcgttaattcttgtactgtacctaatgtttgtgttgtagggtatacattgatgaaacaaccagcgtctataatttttttactaccattcattggcatatttttaagtttactagctgtaccaccgtcaatataatagaaccctgcttgtgttaagtcatttaagtcgtcaatatggtctggaattgataacgcacgtccatcgtcttttgttaatttatagttttgtgaacctctcgcacgtaatgcttcaaagtgttcatactcaccaagttgaaagaacccatataaattattgaatcgttttccaccaccgccattagtcatagcaagtaataacgatttacgttttgtttttggattggtataaatacaaataccctccggctctttaaagttatcacgtggaaaattaataccgtcttgatatgataatttaaacggataatcataaatcttttgaccagttgttaatgaatatttaccaatttgaacgtgtgaattaactgaactgttaccacttaaccagtataaatcatcaccatcaacggcaatcccttgcatccatcgattatcattgttttctgaattatcaatcgtcatttctttttctacattatcaatgtgattttttacgtcagctcttgaacgtacctgtattgtcccgtcaccgaatcttaaaacgattttgtcattttcttcatcaattaacggtgtaaacgtgtgtttgtttaaaagtgactgtggtgtataatctgttaaccctttagcctcttctaaatctaaaatataattatctttatatgcgacttgtaacagttttgctacaccgtcatgatgtaaccatattttcatttcaccgttagattgtctttctaaacctattgtagtaccgtgaccaccttgtacaatacgcatactagaaattaagtcaccgctaggcgttaatttattaatccaaaaaccttctgggttttgtgaatctgattgtgtagagtacatttgattcgtttctttatctatgtttatagattggttaacagcattacgaataccaccgaatcccataacaaactttggttcaagctcatttaattcaaaaccattaacaaaacggtcaatgtctttaattaagtctttaacttctgatttaaaatcattcatttgtttcatttctgcaactttaaataatgcaaatgcagatgtaagaccagtactatatttagtaaattcatcatgaataattttatctattgtaccgtcgtttaaccaacctctaaataagtctttcgcttggtctgggaatgctttcattaagtcgtcccaatttttgaaacgtttttttaattcattgtcatagtcccaaatacgacgtgctaatacttcaattagttttgataatcttgaaatataatcataatatgattttgaattggtattataatctgctctatcatcgtaaaacggtgtgtaacgttctctcgttttatatatttcgtctaaaaatggacgaatgtcgtcaaaatatttaaaatcgttttcattatatgccataattttccacctttaccaaatttgtaaaaaacattttttatcaaattcatttaaaattttctttcttaaatcgtatactttatcaatattatcaattaaatactgttttgaaaattgtgtacctttcgcattacctttttgattttgattacgttttgcgttttgattactttcgttacttgatttattcacagttttaccgttgtcaattgtattattatctgcaaatcgtaacgttgtgttatctacatcaatgttaacctcgctttgtggtaatgacgcataagcatttctgttcgctgtcatgccagttgaattgtctaaagatgttgcattttgatttgaggtttcatctgtattgtttgttgtatcttcattatgttctgtaaaaccttgtgattgtagatatttttcaacttcgcttgatgaataaaccacattcaaataatcctcatgtgtgatacatacagtaatcacttgcatgccaaaagcttcaactgtttgtctgttgatttctctatctaaaaagtgtattgtaaatgattttttaaaaagtaagtcagataagtcatctttaagtttaaaacctttaaacactttttcattaacgatggctaaaacgtctttgtcaaacttcaacattttttgcatgaattgaaattcatcatcataaaacgttaatttatcattatttacaaattcattaaaaccttttttaattaattctgatttaataaaatcaaataaagtcattgtatatctagccattgtattcactactttcatcattagacaatgtatctatcattgtgatttctgaagtaacttcatcgtcgtaatacggtttaatatctaaaccataacgttttgataagaatgtaatcggttcacgaccttttaaataaatattactatttgatgtggtaaaacctcggttgctttttgcctcttcgtccgaaacaccgctttccttatccactgctagtgagttaatacctaaatagttacttaattcactaattttattttggtattcgcgtttcatctcagttagtgctggaatcacactattactggttaaatctatgatatcatcatcggcgttaaacataggtgacattttaacaaatggtgcaccgttgtatatttccgatacaagttgattaactgactcatcattaatgtctgatttaaatattttgctaaattttgcttgcataattaatgagaatctagataaaacaacctcagataattcatcagtataatgttctataatttctatatcactattatattgaattggtttattttgcatgacaacaaagttaccactcatacagttatcatatattttatgaatctgtaagcattcatctggtattaaatagtctggaacaatgaaataaatatcatcttttgttaatcgtttttgaaattgaaagttaaagtttgatgaaaaatttggtgcttgattaaagtaagtattatttacgtaaccaagaatcataatttgttcatttcttgctttgccgaccactacattgatgttttgtcttaatgctgattctaattgaataaaatctataccaaccgtatcacgattggtatagttgatgagtagtggtaaaaattccaaataacgattaaacataagacgtttaaatctgttgcgatgttctacaactcttttgttgatttcttttgataattcaacctgtacacctttattatgtttagtcatttatagcacctctattattctgttcttggtgttacatcttggtcagtaattaaaattttattaaagaatgggctaatggctttaaatgaatagtaatgaatccagtgtgtgacttcatcaaattcaccattatagaatggttgttttaacataccttttgtgtaacgtttatatttaattgaattaatatccaaaataaacgcgtataaatctgattttggtttaatttcttcaacattatctttaaactctgatagttttgacacatcataagtgaatactgaaccaactggaattgtatcacctttatgagtttgataatcaccgtaagcacgtaagaaagctactgattcatcacttgatacgacaatatctttagtgactttgaaaacaccacctaggtcgtcaaaactgataacgtggtctgtaaagtcaatccctgctacttggaatgtgttcgcaatctttgtatctaaaagataagattttaagctatcagtcgttaaaataacaatatcttttaattttgaaactgttgtatattgtccgattgcaccacctgaagcacgatgaacttcattatatttagcgctgttgttttgtaagttaagaatagcttcaaaaactttacttgctaaatcttcttttgatgttgctttacgtacatttgattcagataattgattcaatgagtaatcaactaacattgcacgcatttctttttcttctaatacgttaatatcagaaattttctttttatagacacctaatgcataattagtagcgtctgctaatgtttggaaattgaaacgtgtgtcattgttatttaatgtaaatttttgtttcttcacaataccactaccatataacttagtagccatacgtggatagttacgtttcaacattagttcttcatttttagataagtccatgttaataggtactgtatccataattacatattcttcactgtattgacctataaagtcctgctctttagctaaccaattaaaacggttacctaatgcaatatcgattaataacgtttcattaatcttagggaataaaaatttatttacaaatgtttcaaacattgtattagaattatcccacttatcgccaaacgtccatgattttgaataagtatgattaaagtcttgtaatgcagatttagctgactttgcaactaatagtgctgtttcgttttttgtactcttttctgccatgatttattattcctcctcaacatcgccagtaaatgactgttttgaaagtgaatgaatttgtacaccataactatcttcacttttatttgtatcaattgacatattttcatttaattctgttcgtttatttaatcttgaatcttcatatgatgtacccatcatagaacgcatgttgttaccctcgtacatgtttaagttcctcctaatctaaatctaatttatcgacaagttcttcatctgaatagtctttatcattgttatctgtttcttttgattctggttgtggttgtggttgtggttgtggttgttgcatttgtgatgtttcaaaattagtaaatcgttgttctaatgaagcgatacgttgttctaaaacaactgggtctaattttgcacaatcttcatctgttgtagtaggttctaatttgttttcattttcttcttcgattgtttctactgttttatcttcagttgattcttcagttgattcttcagttgattctgaagtttcttcagttgattctgaagtttcttctttgtcgtctggttttacgatttcatcaaattctgtcattttgacacctccaaatattttataactaattatatcatagaatatttaaataagtaaattaaatttattttattttcaaatcataactttgaataaaagtcaatagatacataaattttgtatttaatgaatatgtaataggttagataagttggaaaagtagacgcacagtttttataagtttagtaaagaaatgatatgttaatttataagttttgatttgtataatcgtttattttaaacggtggggaggtgtaaatttacaataactttttccc

SEQ ID NO: 91 - DNA, 18146 bp, Rosenblumvirus sp.
  source 1..18146: mol_type = genomic DNA
ggaaaaagtttttgtaaaattacacctccccaccgtttaaaataaacgattatacaaatcaaaacttataaattaacttatcatttctttactaaacttataaaaactgtgcttctacttttccaacttatcaaacctataacatattcataaaatacaaaatatatgtatctattgacttttattcaaaattatgatttgtatttaaaatctaatttcttctattaaatagtatttttaaattatttaaactttttaagaaaaaccattgacaaaacttttaaacgtttgctatactatgtatgtaatcaaatcaaggaggtaacaaaatggaaaatgtacaacctttacaaacttacattttaaaaaatggtaatatagttattgttatgggtaatacatcaacttatgaattaacattatttgtacttgaaaaggacgattttgaacaattagaccataattcacctaaaaaaatcgttgatgaattaaggaatgaaatcaatgatttaaggagtgataataatggttaatgttgataatgcacctgcagaaaaaggtcaagcatatactgaaatgttgcaactattcaataaacttattcaatggaatccagcttatactttcgacaatgcaattaacttagtatcggcttgccaacaactattattaaactataatagttctgttgttcaattcttaaatgatgaactaaacaacgaaactaaaccagaatctattttatcttacattgctggtgatgacccaatagaacaatggaatatgcacaaaggattttatgaaacgtataacgtttacgttttttagaaaggagtgatataataatgaaacctgatgatattgttacattacgaattaaaggttatattcttcactatttagatgataaaaatgaatatgttgaagaatttattccacttcatgagtatcatttatcaaaaacacaagcaaaagatttattacctaattcacacaaacttttatccactacacgcacaacgaaaacaattcaagtttattacaatgatttactacaaatttcaattccagaaagcaaataatttaaataagaggagaaataaaaatgacaaacgtaaaagatattttatcaagacaccaaaacacattagcgagatttgaatttgaggaaaaagaaagagaatttattaaactatcagaattagtagaaaaatacggtatgaaaaaagagtatatcgttagagcattattcacaaacaaagaatcaaaattcggtgaacaaggtgttatcgtcactgacgactataacgtaaacttaccgaatcacttaactgaattaattaaagacatgcgtcaagacgaggacgttgttaacattatcaatgctggtgaagtgcaatttacaatttatgaatatgaaaacaaaaaaggtcaaaaaggttactcaatcaactttggtccagtatcattttaatacaattttataggggatatttatcccctatttttatgaggtgctaaacaatggaaaaaatatacactgccgtattattatacaatgtatcaattaatgaaacatatgaacatgaaattgaacaattcgaaaaaataaataaagttaaggtaatatatagttattttgacgcaaacttttacaaaaaaggtgcatataatctttgtgtaaaatacattaaggagatataaaatgaatattacaacaatattaaacacaaaaaaattaattaattatattttagataatagagattgttttatgaataaaataacaaaatttgaatcactaagtggaaaatgtgttgtttttgttagatacggtgaaatttctattgaatactatgatagtgatacaaaatacaatgatttatttactttagacattgacgttgatgttcgtacatatagttttagttgtcttgaggttttttatcgagaacatttaaacccattatataaaaaagaagtttttatggattgtactattgatgacgtattagaatatttcgagaaaccaatagaaagtaatataacaataatttttcaaaacaaagtgatatataataacgggaacgtgatagaacatgactaatatattaaacatagctattattttccttttagcatttttaattacacttgtaatacttatgacaatgcatatacgtgtgtcatttggtgttttatttactacattgattatattctacattatctttttagtggttatatatgggttatatggaggtcgttagcaatggttagacatacgtccgaaatggataaatggaaaaaagaaagagacgcaagaaaagagcaggaaaaagaattgtttttaaatgattttagtactgttaattttaaatttgatgataaagatttacaagaggcgtacatagacacatggaaacatttcgcacatttgccctattttccaaaagaaagaaacgtgtcatatgcaaatgccgtatcattggtaagaggtaaaagacatgaacaattaaactatatacttgaaatatataaccgtaaagatgaatctaataataaaaacgctaaaaaacataaatatgctttatatgaattacaagctaaaaataataattcttctatgtataaatatattaaagaaattgacactttatacaaagaaattggtaaatcagacagaccagtgactactattgatgataaagatgtgaggtataactttttatattatgcaacatttgaagagtaattttaatactgtaaacgacatcataaactattataaggagcaaaaacatggtgaaacaaaatcgtttagacatggtaagagattatcaaaatgctgtcaatcatgtcagaaaaaaaataccagataactataatcaaatagaattagttgatgaactcatgaatgatgatatagactattacatatctatttcaaaccgttctgacggaaaatcgttcaactatgtttcattctttatttatttagctataaaacttgatattaaatttactttattatcacgtcattatacattacgtgacgcttatcgtgattttattgaggaaatcatagacaaaaacccactattcaaatctaagcgtgtcacattcagaagcgctagggactatttagctatcatctatcaagataaggaaatcggtgtgattacagatttgaatagtgcaactgatttaaaatatcattctaactttttaaaacactaccctatcattatatatgatgaatttttagcacttgaagatgactatttaattgacgagtgggataagttaaaaacaatttatgaatcaatcgaccgtaaccatggtaatgttgattatattggctttcctaaaatgtttttactaggtaatgcagtcaacttttcaagtcctatattatccaatttaaatatatataacttattacaaaaacataaaatgaacacatcacgactttacaaaaacatttttttagaaatgcgaagaaacgattacgtaaatgaaaagcgtaacacacgggcattcaattcaaacgatgacgctatgactactggcgagtttgaatttaacgaatataatttggcagatgataatttaagaaatcatatcaatcaaaacggtgattttttctatattaaaactgacgataaatatataaaaattatgtataatgttgatacatttaatgctaatattattgttataccttatacaaaacaatatgaattttgtactaaaatcaaagatatagatgacaatgttatttatttaagagaagatatgttttataaagaaaacatggagcgttattattacaatccaagcaatttacattttgataacgcttactcaaaaaattacgttgttgataatgatagatatttatatttagatatgaataaaattataaaatttcatataaaaaatgaaatgaagaaaaatatgagtgaatttgaaagaaaagaaaaaatatatgaagataactatattgaaaatacaaagaagtatttaatgaaacaatacggcttataaaaggtgtgtaagattatgggattactagaatgcatgcaatatcataaacatgaacgtcgaatgattttatactgggatatagaaacattagcgtacaataaagttaacggacgaaaaaaaccaaccaaatataaaaacgtaacgtattcagtagcaattggttggtttaatggttatgagattgatgtagaagtatttcctagttttgaatcgttttatgacgcattttatacgtatgtgaaacgacgtgatacaatcactaagtcaaaaacagatattatcatgattgcacataactgtaataagtatgacaaccattttttacttaaagataccatgcgttattttgataatatcacacgtgaaaatatatatttaaaatctgcagaagaaaacgaacacacactaaagatgcaagaggctactattttagctaaaaatcaaaatgtgattttagaaaaacgtgtgaaatcgtctattaatttagacttaacaatgtttttaaatggatttaaatttaatattattgataactttatgaaaacaaatacatcaattgcaacattaggtaaaaagttgcttgacggtggttatttaacagacgaccaacttaaaacagattttaattacacgatatttgataaagataacgacatgtcagatagtgaagcctatgactatgccgtaaagtgttttgctaaactcacacctgaacaacttacatacattcataatgacgttattatattaggtatgtgccatattcattatagtgatatatttccaaattttgactataacaaattaacattttcattgaatattatggaatcgtatttaaataatcaaatgacgcgttttcagttactcaatcaatatcaagatattaaaatatcatatacacattatcatttccatgatatgaatttttatgattatatcaaatcattttatcgtggtggtttaaatatgtataacactaaatacataaacaaacttattgatgagccttgtttttctattgatatcaattccagttatccttatgtgatgtatcatgagaaaattccgacatggttatacttttatgaacattattcagaacctacattaatccctacttttttagatgatgacaattatttttcattatataagattgataaagatgtatttaacaatgatttattaattaaaatcaaatcacgtgtattacgtcaaatgattgtaaaatactataataatgataatgattacgttaatattaatacaaatacattaagaatgattcaagacattacgggtattgattgcacgcatatacgtgttaattcgtttgtgatatatgaatgtgaatactttcatgcacgtgatattatatttcaaaactattttattaaaacacaaggtaagttaaaaaacaaaatcaacatgacatcaccttacgactatcatattactgatgacatcaacgaacacccttactcaaatgaggaggttatgttgtctaaagttgtacttaacggattatatggcatacctgcattacgttcacattttaacttattccgtttagatgataacaacgaactatataatatcattaacggttacaaaaacactgaacgtaatatattattctctacatttgtcacatcacgttcattatataacttattggtacctttccaatacttaactgaaaatgaaattgacgacaattttatttattgcgatactgatagtttgtatatgaaatccgttgttaaacccttattgaaccccagtttattcgacccgatagccttaggtaaatgggatattgaaaacgaacagatagataagatgtttgtactgaatcataaaaaatatgcatatgaagtgaatggaaagattaaaattgcttctgctggtataccgaaaagcgcctttgatacaagcgtcgattttgaaacctttgtacgtgaacaattctttgacggtgtgataatagaaaacaataaaagtatctataacgaacagggtacgatatcgatttatccgtctaaaacagaaattgtatgcggtaatgtatatgatgaatattttactgatgaacttaatatgaaacgtgaatttatcttaaaagacgctagagaaaattttgaccatagtcaatttgatgatattctttatattgaaagtgacatcggttcattctcacttaatgacttatttccagttgtacgttcagtgcataataaatctaatttgcatatattaaaacgtgaacacgatgaattaaaaaaaggcaactgttaaataacagtcgcctttttcttttgatataacatgaaaaatgtgtacgaaaattgattatgttttgtattttatttactagcattactagcatgttttcattatagcatagttaattaagcaataccactgaagaatacaatattatcaccagcgttatgaggtacaccattaatcaatgtatataatacaacccgtgacggtgccacgtatggtgggacgttatagtttgctactaagaatgaaccatcgtcaaatactgctacaacgacacctgtgtgaccaatgccatatgctgttgcttgtaagtatggtggtttacttgaaaaaccataccctactgttggattatgtgttgtttttgcacctaactttttatatacgtaccacacacgttgaccgtttgttatttgaccgtcgtctgttggttgtcttttaccatgtaattgtgacatatatgcccatgttaattctgtacattgtcctgcattacccgtttgaggaaatatgttacctggtttgtacaagtattcttttttgaataaaggtacaccaattgcttttttatatttttctggtaactgtgcatacgtccagttaccaccaatgacgcgtccacttttaccatttggtttgactgacttaccactaattggtttatggtccccgtcatcatcagtagggtttgaactactatccccactatctacttgcacactatcaatcagtttttttaatgaatcaagtagcccaatcgtcattttaatatgatatgtgttgttaaatgttttttgtaatgtaaaataatcattactaaaaaatttatcactaccaatactgtgtacatcccattgtaatgcgtcttgtactttttttaataattcttgcatggcttgttttgctaaagcgagcagtgaactaccactgtcaccactactaccactgtcagacgaatcactaggtgaaccacctttaccgtctaatttaccaccccatgctaaaatagtatttgcaccgtctaaaaaaggattaccatagttttgtactttattatatgacgctttcaaacctaggggataatatgccgcccaagtagccgctgctgttaatggaatatacgcacgtccgattgtacctgctttcatatttttagcaaaatctgcattaccttttctttgtacgtcttgaggtacaaagtgaacgatgttacctgcgtcataccaagacggttgtcctgcttgttttgattgtgatactaattttcttgcaatgaatttagcgtctgttaaatagtcacctcgtgcagatgtatggttcaaccaacctaaaccagcgctatacccttcatttttttcatatacagcaaaaagagtaggtgacacacctatctcttttactgcttttaatacttgtctgattttactttcattaccacctagccatacattaaagcgtccatacccttttactttagggactaactggtctatcgttaaaccgaaatcatcattaatatacgaatgcgtaaatttatctatcttctcttggtcgttcattattatcacccttttcagaatcgtttttaattactcttaatttatctttaatttgttcaggcactaatacgtccatttcagcacaattttcaacaatagatagtccctcatttgcgatataatagaaaatcgtaatcatgagtaaaccaccttttaattgtaaaatctggtcaatgatgttagctaaaatgataatacagaatatcaataattttttagcaaaacctttcattgattttttagaccatagattattatttttaattgctttagcaaaaccagtaacaacatctataatcatcaaaacaaataaaaaatatagtaactttaaatcacctgcatatatgaacatatgaaatgcttctgtgtccgtaaatcttaattttacctcattcattttatacaccttctctaaatttattatttaacgggttctgtaacattggattacctgaaccgtcattatgccaaaatctcacaccagattctaaaattgcttttaattgttccattaacatagggtcaatgtcacgtatggtatacgtacctgtacattttaaatagttgcatacagtcatgctgttaataggttcaatgaatgtattatagtcatttacttcaaaaccaaacaacatataatatttttgtaaaaatgtaatttctttaggtgacggtacactaattttcatcgttaaaccgttaatgctatttgcaatttggaatgcgtttcccatttctgattctgtcacagatggtggttgtaaggctaaatctttatattctgcctgttgttgtttgtagaaattatattcttcattaaacttaccaaataaagcggttggacttaaattacttgctacacttacagcgtcataaaaacgtgattttgggtcactaccatttaatacattatctatacgacttgtgattaattgactttctgcattacgctgtctattggcttgttgtgattgtcctaaaattccgttattaattaatataggcacttgcgcaaaactattaaatgttatattggtatttaagaatgaacctgtatcaattaatatatctttatttttagcaagtatcggtctatcgttttcagcactgttataatcaactggatatactcgcacttcattatgataaccaatgatggattttgtacgtaacttaacacctgttttttgtgaaattttaccagcgtcaagtaacattgtgttaccgttccagtcataaaattcaatcgtcatgtactcattacgtatcatatgtttaaactcgtcttttttagacaacatcatctcttgaagctttgtgaaacttaatgataaatcgtttaaactccattcttttgattttccaccctgttttaatgtctttaatccagtaattttttcacttgtcttaacgtcctctaaatcttttgtattaataaaatctttaggtaacatttgaaccttttgaaagttttgtgtaatccatggatatgcactcattttatccataaagttaataaagtcaccatattccataacgtataagttgactggcgatgtgatattgtcatatatcgtacctttagacgtatctaagtttggctcttttttcgtaccaaatttctttgataaatcagcgcttgactggaataacactaaattttccaaatactgttgcatttggttatacacatagtttttatttgatacttttaacacatcatcattgttacgtaacatcggcaacatatagttatacgtacgctttgataagtgttgacgttcaatattaacgtttgaaagttgttctaatacattaccttgtgtatacgtcataatagtatcaatcacaaaatatatttttaccacaacatcattcacatattcgatttgattcacaaaagcgtaatagcgtctatcctcaaaatctgataaaaacgtcatgtagttaatcccttgtgcgtcatgccactgcatatcaacattgatttccattctatcacgtataaaattatacggttgtttggaatagtctaatgatttaaaatgacgaccgtttaaaaaataatcatcacgctctttattactattaaaatgaattgtattttgatagtctgtaaacggtgtgttatagaaaaatttaaaatttgttaattttctcatttttacctccataaaaaatagtcgtataaataatttatacgactattataacatttttattcaatgatttgtgtatctattgcaaaacgtttatctccatttgttaagtcactatcgctataatttgatgtaacaaaatgtaattcattattaaagtttaaatataatcttgtattcatcattttattatcaatcgcacattgtgtgtagtgatgtgttgattttaagtttgcgttaatcgtacctaatttaatatcaccgtttttcttaatcccttttaataccccttttaattgtatggttttaacaccattaattgttacaatacgatattgcggtgcgggataacccccgttgctatcacttgcaacaataccactttcaagttgcacatcttgccaacctgtatcattaaattgtaattttgcactgttaattttttgatcaaaattttgttcaatttctgatttagattgtgcaattttagtatctatatttaagttatccacttttgttgataaaacgcttatacttgattcgtttgttgatgttttttgttttaaatcactaatatcattatcatattttgataaatcaatatgaccgtttccgtcaacaactggtctgtcttttaattcttgaataactttttcaatttttgatattttatcattatttgtttttaaagtagcgatgtcagatttaattgaattaatatcctgtgtataatctttttggttaatactgtttaattttgtttctaactcttttatcttatcaaggttggtatttgctttgatgtcattaatggtttgttctaaactttcaagtttcccagaacttgaattttgttttaacttattaatatcctcttgtatttcttgaattgtgttgtcattgttttgtttagattttaataattcaatttgactttctatgtcttttattttatcaagattaacactttttttaacttcagctaattctctttttaatgcgtcaatgttttctgcaccagtatttgatttaattatattaatttcatttgtgtttcgtcctacactatctttagtagcgtttaaagattgtgtaagtgtttcatatttatcatcatactttaacattgatttttcaaattcatttaattgtgtttgatgttgttctaaactttcatttaatatgacatttttttcttttaatgaatcaatgtcttttttattactatcaatcattggttggaatttttttattttctctagaaatgttgatattttttctttgttatcattaattgcaatatcatgatgttctatttgaccactgtatttattaatcaatgtttttaaatcattataaaatgttaatttataataaccagtatcagtacggacataaatatgtccgtctgatgtactgattaagtcattttcttctgttaaaaaatctgctaacctgtctattgtttcaacttgtcttaaacttcttacgattctatcagccattgttcacacctcttatttgtatcgtttccaactaaactcaaagaaaaaacctaaaatacccattatgagaaaaccccccaaggaataccaacactataactattacccgttttaccgttccattttcttactggtaaataataacgtgtaccttgccagttgtaaccaatccatacatacccatctgataaacaaacttcgtcatatggtgtataaccatttggttggaaccaatatccattaggttcacttaatttaggactacctacacgtgcaaatattggtaaaaatccacatgtaaatgttgcattttcatttctgtaatatgtgccatattggttttgtttccattttccgaatgtgtttacttttgatgtttctaattcgttgctgttactagcagaaaatttaggtctaataaagtgtgttacaccgtcataataatgtgttcttattgttgctttttcccaaccgtcaaacccaccacctaaccagttttgctctaaacatgtataataatctaaattaccacttaacacacattgaatatgtccatattgtccatctgtatatacaccaacatcccctaattgtggtttaaagttcggtgtattttcatacaccattgctaaacctttaaagtcattattgattgcgtctttagcgttaccccacatacgaactttaccgtctgtaatgtaatatatataagcaacagctaagtcagcgcattgataaccaaatgctaaatcaaagtccacacctacaccctcatgcttatatatccattcttttgcttgttgttgtgatttcatgaaacattatcctttcttaacccaactatattgacgtttttttgtatctgcattaacgttactaaagaattctttatgttcggacacattagcctctaatgtttgtcttacttcaccgacagcgttaccacttgaaacacgtaaccatgcacccacttttttaatttcttctggtgcgtctctaaacaattccatttggttaccagtaatataatattcaccaggtgtcgtaacgtaagctatccagttattgtattgacttgcttctaaatactcttgatatggtgcgtctgttttgattgttgtccataaaccataatcccattttaatgtaaatacatcgagcgtcataccacgcatgattttaaccatttttcgaccagtagaaaaacgcgttaattcttgtactgtacctaatgtttgtgttgtagggtatacattgatgaaacaaccagcgtctataatttttttactaccattcattggcatatttttaagtttactagctgtaccaccgtcaatataatagaaccctgcttgtgttaagtcatttaagtcgtcaatatggtctggaattgataacgcacgtccatcgtcttttgttaatttatagttttgtgaacctctcgcacgtaatgcttcaaagtgttcatactcaccaagttgaaagaacccatataaattattgaatcgttttccaccaccgccattagtcatagcaagtaataacgatttacgttttgtttttggattggtataaatacaaataccctccggctctttaaagttatcacgtggaaaattaataccgtcttgatatgataatttaaacggataatcataaatcttttgaccagttgttaatgaatatttaccaatttgaacgtgtgaattaactgaactgttaccacttaaccagtataaatcatcaccatcaacggcaatcccttgcatccatcgattatcattgttttctgaattatcaatcgtcatttctttttctacattatcaatgtgattttttacgtcagctcttgaacgtacctgtattgtcccgtcaccgaatcttaaaacgattttgtcattttcttcatcaattaacggtgtaaacgtgtgtttgtttaaaagtgactgtggtgtataatctgttaaccctttagcctcttctaaatctaaaatataattatctttatatgcgacttgtaacagttttgctacaccgtcatgatgtaaccatattttcatttcaccgttagattgtctttctaaacctattgtagtaccgtgaccaccttgtacaatacgcatactagaaattaagtcaccgctaggcgttaatttattaatccaaaaaccttctgggttttgtgaatctgattgtgtagagtacatttgattcgtttctttatctatgtttatagattggttaacagcattacgaataccaccgaatcccataacaaactttggttcaagctcatttaattcaaaaccattaacaaaacggtcaatgtctttaattaagtctttaacttctgatttaaaatcattcatttgtttcatttctgcaactttaaataatgcaaatgcagatgtaagaccagtactatatttagtaaattcatcatgaataattttatctattgtaccgtcgtttaaccaacctctaaataagtctttcgcttggtctgggaatgctttcattaagtcgtcccaatttttgaaacgtttttttaattcattgtcatagtcccaaatacgacgtgctaatacttcaattagttttgataatcttgaaatataatcataatatgattttgaattggtattataatctgctctatcatcgtaaaacggtgtgtaacgttctctcgttttatatatttcgtctaaaaatggacgaatgtcgtcaaaatatttaaaatcgttttcattatatgccataattttccacctttaccaaatttgtaaaaaacattttttatcaaattcatttaaaattttctttcttaaatcgtatactttatcaatattatcaattaaatactgttttgaaaattgtgtacctttcgcattacctttttgattttgattacgttttgcgttttgattactttcgttacttgatttattcacagttttaccgttgtcaattgtattattatctgcaaatcgtaacgttgtgttatctacatcaatgttaacctcgctttgtggtaatgacgcataagcatttctgttcgctgtcatgccagttgaattgtctaaagatgttgcattttgatttgaggtttcatctgtattgtttgttgtatcttcattatgttctgtaaaaccttgtgattgtagatatttttcaacttcgcttgatgaataaaccacattcaaataatcctcatgtgtgatacatacagtaatcacttgcatgccaaaagcttcaactgtttgtctgttgatttctctatctaaaaagtgtattgtaaatgattttttaaaaagtaagtcagataagtcatctttaagtttaaaacctttaaacactttttcattaacgatggctaaaacgtctttgtcaaacttcaacattttttgcatgaattgaaattcatcatcataaaacgttaatttatcattatttacaaattcattaaaaccttttttaattaattctgatttaataaaatcaaataaagtcattgtatatctagccattgtattcactactttcatcattagacaatgtatctatcattgtgatttctgaagtaacttcatcgtcgtaatacggtttaatatctaaaccataacgttttgataagaatgtaatcggttcacgaccttttaaataaatattactatttgatgtggtaaaacctcggttgctttttgcctcttcgtccgaaacaccgctttccttatccactgctagtgagttaatacctaaatagttacttaattcactaattttattttggtattcgcgtttcatctcagttagtgctggaatcacactattactggttaaatctatgatatcatcatcggcgttaaacataggtgacattttaacaaatggtgcaccgttgtatatttccgatacaagttgattaactgactcatcattaatgtctgatttaaatattttgctaaattttgcttgcataattaatgagaatctagataaaacaacctcagataattcatcagtataatgttctataatttctatatcactattatattgaattggtttattttgcatgacaacaaagttaccactcatacagttatcatatattttatgaatctgtaagcattcatctggtattaaatagtctggaacaatgaaataaatatcatcttttgttaatcgtttttgaaattgaaagttaaagtttgatgaaaaatttggtgcttgattaaagtaagtattatttacgtaaccaagaatcataatttgttcatttcttgctttgccgaccactacattgatgttttgtcttaatgctgattctaattgaataaaatctataccaaccgtatcacgattggtatagttgatgagtagtggtaaaaattccaaataacgattaaacataagacgtttaaatctgttgcgatgttctacaactcttttgttgatttcttttgataattcaacctgtacacctttattatgtttagtcatttatagcacctctattattctgttcttggtgttacatcttggtcagtaattaaaattttattaaagaatgggctaatggctttaaatgaatagtaatgaatccagtgtgtgacttcatcaaattcaccattatagaatggttgttttaacataccttttgtgtaacgtttatatttaattgaattaatatccaaaataaacgcgtataaatctgattttggtttaatttcttcaacattatctttaaactctgatagttttgacacatcataagtgaatactgaaccaactggaattgtatcacctttatgagtttgataatcaccgtaagcacgtaagaaagctactgattcatcacttgatacgacaatatctttagtgactttgaaaacaccacctaggtcgtcaaaactgataacgtggtctgtaaagtcaatccctgctacttggaatgtgttcgcaatctttgtatctaaaagataagattttaagctatcagtcgttaaaataacaatatcttttaattttgaaactgttgtatattgtccgattgcaccacctgaagcacgatgaacttcattatatttagcgctgttgttttgtaagttaagaatagcttcaaaaactttacttgctaaatcttcttttgatgttgctttacgtacatttgattcagataattgattcaatgagtaatcaactaacattgcacgcatttctttttcttctaatacgttaatatcagaaattttctttttatagacacctaatgcataattagtagcgtctgctaatgtttggaaattgaaacgtgtgtcattgttatttaatgtaaatttttgtttcttcacaataccactaccatataacttagtagccatacgtggatagttacgtttcaacattagttcttcatttttagataagtccatgttaataggtactgtatccataattacatattcttcactgtattgacctataaagtcctgctctttagctaaccaattaaaacggttacctaatgcaatatcgattaataacgtttcattaatcttagggaataaaaatttatttacaaatgtttcaaacattgtattagaattatcccacttatcgccaaacgtccatgattttgaataagtatgattaaagtcttgtaatgcagatttagctgactttgcaactaatagtgctgtttcgttttttgtactcttttctgccatgatttattattcctcctcaacatcgccagtaaatgactgttttgaaagtgaatgaatttgtacaccataactatcttcacttttatttgtatcaattgacatattttcatttaattctgttcgtttatttaatcttgaatcttcatatgatgtacccatcatagaacgcatgttgttaccctcgtacatgtttaagttcctcctaatctaaatctaatttatcgacaagttcttcatctgaatagtctttatcattgttatctgtttcttttgattctggttgtggttgtggttgtggttgtggttgttgcatttgtgatgtttcaaaattagtaaatcgttgttctaatgaagcgatacgttgttctaaaacaactgggtctaattttgcacaatcttcatctgttgtagtaggttctaatttgttttcattttcttcttcgattgtttctactgttttatcttcagttgattcttcagttgattcttcagttgattctgaagtttcttcagttgattctgaagtttcttctttgtcgtctggttttacgatttcatcaaattctgtcattttgacacctccaaatattttataactaattatatcatagaatatttaaataagtaaattaaatttattttattttcaaatcataactttgaataaaagtcaatagatacataaattttgtatttaatgaatatgtaataggttagataagttggaaaagtagacgcacagtttttataagtttagtaaagaaatgatatgttaatttataagttttgatttgtataatcgtttattttaaacggtggggaggtgtaaatttacaataactttttccc

SEQ ID NO: 92 - DNA, 18145 bp, Rosenblumvirus sp.
  source 1..18145: mol_type = genomic DNA
gggaaaaagtttttgtaaaattacacctccccaccgtttaaaataaacgattatacaaatcaaaacttataaattaacttatcatttctttactaaacttataaaaactgtgcttctacttttccaacttatcaaacctataacatattcataaaatacaaaatatatgtatctattgacttttattcaaaattatgatttgtatttaaaatctaatttcttctattaaatagtatttttaaattatttaaactttttaagaaaaaccattgacaaaacttttaaacgtttgctatactatgtatgtaatcaaatcaaggaggtaacaaaatggaaaatgtacaacctttacaaacttacattttaaaaaatggtaatatagttattgttatgggtaatacatcaacttatgaattaacattatttgtacttgaaaaggacgattttgaacaattagaccataattcacctaaaaaaatcgttgatgaattaaggaatgaaatcaatgatttaaggagtgataataatggttaatgttgataatgcacctgcagaaaaaggtcaagcatatactgaaatgttgcaactattcaataaacttattcaatggaatccagcttatactttcgacaatgcaattaacttagtatcggcttgccaacaactattattaaactataatagttctgttgttcaattcttaaatgatgaactaaacaacgaaactaaaccagaatctattttatcttacattgctggtgatgacccaatagaacaatggaatatgcacaaaggattttatgaaacgtataacgtttacgttttttagaaaggagtgatataataatgaaacctgatgatattgttacattacgaattaaaggttatattcttcactatttagatgataaaaatgaatatgttgaagaatttattccacttcatgagtatcatttatcaaaaacacaagcaaaagatttattacctaattcacacaaacttttatccactacacgcacaacgaaaacaattcaagtttattacaatgatttactacaaatttcaattccagaaagcaaataatttaaataagaggagaaataaaaatgacaaacgtaaaagatattttatcaagacaccaaaacacattagcgagatttgaatttgaggaaaaagaaagagaatttattaaactatcagaattagtagaaaaatacggtatgaaaaaagagtatatcgttagagcattattcacaaacaaagaatcaaaattcggtgaacaaggtgttatcgtcactgacgactataacgtaaacttaccgaatcacttaactgaattaattaaagacatgcgtcaagacgaggacgttgttaacattatcaatgctggtgaagtgcaatttacaatttatgaatatgaaaacaaaaaaggtcaaaaaggttactcaatcaactttggtccagtatcattttaatacaattttataggggatatttatcccctatttttatgaggtgctaaacaatggaaaaaatatacactgccgtattattatacaatgtatcaattaatgaaacatatgaacatgaaattgaacaattcgaaaaaataaataaagttaaggtaatatatagttattttgacgcaaacttttacaaaaaaggtgcatataatctttgtgtaaaatacattaaggagatataaaatgaatattacaacaatattaaacacaaaaaaattaattaattatattttagataatagagattgttttatgaataaaataacaaaatttgaatcactaagtggaaaatgtgttgtttttgttagatacggtgaaatttctattgaatactatgatagtgatacaaaatacaatgatttatttactttagacattgacgttgatgttcgtacatatagttttagttgtcttgaggttttttatcgagaacatttaaacccattatataaaaaagaagtttttatggattgtactattgatgacgtattagaatatttcgagaaaccaatagaaagtaatataacaataatttttcaaaacaaagtgatatataataacgggaacgtgatagaacatgactaatatattaaacatagctattattttccttttagcatttttaattacacttgtaatacttatgacaatgcatatacgtgtgtcatttggtgttttatttactacattgattatattctacattatctttttagtggttatatatgggttatatggaggtcgttagcaatggttagacatacgtccgaaatggataaatggaaaaaagaaagagacgcaagaaaagagcaggaaaaagaattgtttttaaatgattttagtactgttaattttaaatttgatgataaagatttacaagaggcgtacatagacacatggaaacatttcgcacatttgccctattttccaaaagaaagaaacgtgtcatatgcaaatgccgtatcattggtaagaggtaaaagacatgaacaattaaactatatacttgaaatatataaccgtaaagatgaatctaataataaaaacgctaaaaaacataaatatgctttatatgaattacaagctaaaaataataattcttctatgtataaatatattaaagaaattgacactttatacaaagaaattggtaaatcagacagaccagtgactactattgatgataaagatgtgaggtataactttttatattatgcaacatttgaagagtaattttaatactgtaaacgacatcataaactattataaggagcaaaaacatggtgaaacaaaatcgtttagacatggtaagagattatcaaaatgctgtcaatcatgtcagaaaaaaaataccagataactataatcaaatagaattagttgatgaactcatgaatgatgatatagactattacatatctatttcaaaccgttctgacggaaaatcgttcaactatgtttcattctttatttatttagctataaaacttgatattaaatttactttattatcacgtcattatacattacgtgacgcttatcgtgattttattgaggaaatcatagacaaaaacccactattcaaatctaagcgtgtcacattcagaagcgctagggactatttagctatcatctatcaagataaggaaatcggtgtgattacagatttgaatagtgcaactgatttaaaatatcattctaactttttaaaacactaccctatcattatatatgatgaatttttagcacttgaagatgactatttaattgacgagtgggataagttaaaaacaatttatgaatcaatcgaccgtaaccatggtaatgttgattatattggctttcctaaaatgtttttactaggtaatgcagtcaacttttcaagtcctatattatccaatttaaatatatataacttattacaaaaacataaaatgaacacatcacgactttacaaaaacatttttttagaaatgcgaagaaacgattacgtaaatgaaaagcgtaacacacgggcattcaattcaaacgatgacgctatgactactggcgagtttgaatttaacgaatataatttggcagatgataatttaagaaatcatatcaatcaaaacggtgattttttctatattaaaactgacgataaatatataaaaattatgtataatgttgatacatttaatgctaatattattgttataccttatacaaaacaatatgaattttgtactaaaatcaaagatatagatgacaatgttatttatttaagagaagatatgttttataaagaaaacatggagcgttattattacaatccaagcaatttacattttgataacgcttactcaaaaaattacgttgttgataatgatagatatttatatttagatatgaataaaattataaaatttcatataaaaaatgaaatgaagaaaaatatgagtgaatttgaaagaaaagaaaaaatatatgaagataactatattgaaaatacaaagaagtatttaatgaaacaatacggcttataaaaggtgtgtaagattatgggattactagaatgcatgcaatatcataaacatgaacgtcgaatgattttatactgggatatagaaacattagcgtacaataaagttaacggacgaaaaaaaccaaccaaatataaaaacgtaacgtattcagtagcaattggttggtttaatggttatgagattgatgtagaagtatttcctagttttgaatcgttttatgacgcattttatacgtatgtgaaacgacgtgatacaatcactaagtcaaaaacagatattatcatgattgcacataactgtaataagtatgacaaccattttttacttaaagataccatgcgttattttgataatatcacacgtgaaaatatatatttaaaatctgcagaagaaaacgaacacacactaaagatgcaagaggctactattttagctaaaaatcaaaatgtgattttagaaaaacgtgtgaaatcgtctattaatttagacttaacaatgtttttaaatggatttaaatttaatattattgataactttatgaaaacaaatacatcaattgcaacattaggtaaaaagttgcttgacggtggttatttaacagacgaccaacttaaaacagattttaattacacgatatttgataaagataacgacatgtcagatagtgaagcctatgactatgccgtaaagtgttttgctaaactcacacctgaacaacttacatacattcataatgacgttattatattaggtatgtgccatattcattatagtgatatatttccaaattttgactataacaaattaacattttcattgaatattatggaatcgtatttaaataatcaaatgacgcgttttcagttactcaatcaatatcaagatattaaaatatcatatacacattatcatttccatgatatgaatttttatgattatatcaaatcattttatcgtggtggtttaaatatgtataacactaaatacataaacaaacttattgatgagccttgtttttctattgatatcaattccagttatccttatgtgatgtatcatgagaaaattccgacatggttatacttttatgaacattattcagaacctacattaatccctacttttttagatgatgacaattatttttcattatataagattgataaagatgtatttaacaatgatttattaattaaaatcaaatcacgtgtattacgtcaaatgattgtaaaatactataataatgataatgattacgttaatattaatacaaatacattaagaatgattcaagacattacgggtattgattgcacgcatatacgtgttaattcgtttgtgatatatgaatgtgaatactttcatgcacgtgatattatatttcaaaactattttattaaaacacaaggtaagttaaaaaacaaaatcaacatgacatcaccttacgactatcatattactgatgacatcaacgaacacccttactcaaatgaggaggttatgttgtctaaagttgtacttaacggattatatggcatacctgcattacgttcacattttaacttattccgtttagatgataacaacgaactatataatatcattaacggttacaaaaacactgaacgtaatatattattctctacatttgtcacatcacgttcattatataacttattggtacctttccaatacttaactgaaaatgaaattgacgacaattttatttattgcgatactgatagtttgtatatgaaatccgttgttaaacccttattgaaccccagtttattcgacccgatagccttaggtaaatgggatattgaaaacgaacagatagataagatgtttgtactgaatcataaaaaatatgcatatgaagtgaatggaaagattaaaattgcttctgctggtataccgaaaagcgcctttgatacaagcgtcgattttgaaacctttgtacgtgaacaattctttgacggtgtgataatagaaaacaataaaagtatctataacgaacagggtacgatatcgatttatccgtctaaaacagaaattgtatgcggtaatgtatatgatgaatattttactgatgaacttaatatgaaacgtgaatttatcttaaaagacgctagagaaaattttgaccatagtcaatttgatgatattctttatattgaaagtgacatcggttcattctcacttaatgacttatttccagttgtacgttcagtgcataataaatctaatttgcatatattaaaacgtgaacacgatgaattaaaaaaaggcaactgttaaataacagtcgcctttttcttttgatataacatgaaaaatgtgtacgaaaattgattatgttttgtattttatttactagcattactagcatgttttcattatagcatagttaattaagcaataccactgaagaatacaatattatcaccagcgttatgaggtacaccattaatcaatgtatataatacaacccgtgacggtgccacgtatggtgggacgttatagtttgctactaagaatgaaccatcgtcaaatactgctacaacgacacctgtgtgaccaatgccatatgctgttgcttgtaagtatggtggtttacttgaaaaaccataccctactgttggattatgtgttgtttttgcacctaactttttatatacgtaccacacacgttgaccgtttgttatttgaccgtcgtctgttggttgtcttttaccatgtaattgtgacatatatgcccatgttaattctgtacattgtcctgcattacccgtttgaggaaatatgttacctggtttgtacaagtattcttttttgaataaaggtacaccaattgcttttttatatttttctggtaactgtgcatacgtccagttaccaccaatgacgcgtccacttttaccatttggtttgactgacttaccactaattggtttatggtccccgtcatcatcagtagggtttgaactactatccccactatctacttgcacactatcaatcagtttttttaatgaatcaagtagcccaatcgtcattttaatatgatatgtgttgttaaatgttttttgtaatgtaaaataatcattactaaaaaatttatcactaccaatactgtgtacatcccattgtaatgcgtcttgtactttttttaataattcttgcatggcttgttttgctaaagcgagcagtgaactaccactgtcaccactactaccactgtcagacgaatcactaggtgaaccacctttaccgtctaatttaccaccccatgctaaaatagtatttgcaccgtctaaaaaaggattaccatagttttgtactttattatatgacgctttcaaacctaggggataatatgccgcccaagtagccgctgctgttaatggaatatacgcacgtccgattgtacctgctttcatatttttagcaaaatctgcattaccttttctttgtacgtcttgaggtacaaagtgaacgatgttacctgcgtcataccaagacggttgtcctgcttgttttgattgtgatactaattttcttgcaatgaatttagcgtctgttaaatagtcacctcgtgcagatgtatggttcaaccaacctaaaccagcgctatacccttcatttttttcatatacagcaaaaagagtaggtgacacacctatctcttttactgcttttaatacttgtctgattttactttcattaccacctagccatacattaaagcgtccatacccttttactttagggactaactggtctatcgttaaaccgaaatcatcattaatatacgaatgcgtaaatttatctatcttctcttggtcgttcattattatcacccttttcagaatcgtttttaattactcttaatttatctttaatttgttcaggcactaatacgtccatttcagcacaattttcaacaatagatagtccctcatttgcgatataatagaaaatcgtaatcatgagtaaaccaccttttaattgtaaaatctggtcaatgatgttagctaaaatgataatacagaatatcaataattttttagcaaaacctttcattgattttttagaccatagattattatttttaattgctttagcaaaaccagtaacaacatctataatcatcaaaacaaataaaaaatatagtaactttaaatcacctgcatatatgaacatatgaaatgcttctgtgtccgtaaatcttaattttacctcattcattttatacaccttctctaaatttattatttaacgggttctgtaacattggattacctgaaccgtcattatgccaaaatctcacaccagattctaaaattgcttttaattgttccattaacatagggtcaatgtcacgtatggtatacgtacctgtacattttaaatagttgcatacagtcatgctgttaataggttcaatgaatgtattatagtcatttacttcaaaaccaaacaacatataatatttttgtaaaaatgtaatttctttaggtgacggtacactaattttcatcgttaaaccgttaatgctatttgcaatttggaatgcgtttcccatttctgattctgtcacagatggtggttgtaaggctaaatctttatattctgcctgttgttgtttgtagaaattatattcttcattaaacttaccaaataaagcggttggacttaaattacttgctacacttacagcgtcataaaaacgtgattttgggtcactaccatttaatacattatctatacgacttgtgattaattgactttctgcattacgctgtctattggcttgttgtgattgtcctaaaattccgttattaattaatataggcacttgcgcaaaactattaaatgttatattggtatttaagaatgaacctgtatcaattaatatatctttatttttagcaagtatcggtctatcgttttcagcactgttataatcaactggatatactcgcacttcattatgataaccaatgatggattttgtacgtaacttaacacctgttttttgtgaaattttaccagcgtcaagtaacattgtgttaccgttccagtcataaaattcaatcgtcatgtactcattacgtatcatatgtttaaactcgtcttttttagacaacatcatctcttgaagctttgtgaaacttaatgataaatcgtttaaactccattcttttgattttccaccctgttttaatgtctttaatccagtaattttttcacttgtcttaacgtcctctaaatcttttgtattaataaaatctttaggtaacatttgaaccttttgaaagttttgtgtaatccatggatatgcactcattttatccataaagttaataaagtcaccatattccataacgtataagttgactggcgatgtgatattgtcatatatcgtacctttagacgtatctaagtttggctcttttttcgtaccaaatttctttgataaatcagcgcttgactggaataacactaaattttccaaatactgttgcatttggttatacacatagtttttatttgatacttttaacacatcatcattgttacgtaacatcggcaacatatagttatacgtacgctttgataagtgttgacgttcaatattaacgtttgaaagttgttctaatacattaccttgtgtatacgtcataatagtatcaatcacaaaatatatttttaccacaacatcattcacatattcgatttgattcacaaaagcgtaatagcgtctatcctcaaaatctgataaaaacgtcatgtagttaatcccttgtgcgtcatgccactgcatatcaacattgatttccattctatcacgtataaaattatacggttgtttggaatagtctaatgatttaaaatgacgaccgtttaaaaaataatcatcacgctctttattactattaaaatgaattgtattttgatagtctgtaaacggtgtgttatagaaaaatttaaaatttgttaattttctcatttttacctccataaaaaatagtcgtataaataatttatacgactattataacatttttattcaatgatttgtgtatctattgcaaaacgtttatctccatttgttaagtcactatcgctataatttgatgtaacaaaatgtaattcattattaaagtttaaatataatcttgtattcatcattttattatcaatcgcacattgtgtgtagtgatgtgttgattttaagtttgcgttaatcgtacctaatttaatatcaccgtttttcttaatcccttttaataccccttttaattgtatggttttaacaccattaattgttacaatacgatattgcggtgcgggataacccccgttgctatcacttgcaacaataccactttcaagttgcacatcttgccaacctgtatcattaaattgtaattttgcactgttaattttttgatcaaaattttgttcaatttctgatttagattgtgcaattttagtatctatatttaagttatccacttttgttgataaaacgcttatacttgattcgtttgttgatgttttttgttttaaatcactaatatcattatcatattttgataaatcaatatgaccgtttccgtcaacaactggtctgtcttttaattcttgaataactttttcaatttttgatattttatcattatttgtttttaaagtagcgatgtcagatttaattgaattaatatcctgtgtataatctttttggttaatactgtttaattttgtttctaactcttttatcttatcaaggttggtatttgctttgatgtcattaatggtttgttctaaactttcaagtttcccagaacttgaattttgttttaacttattaatatcctcttgtatttcttgaattgtgttgtcattgttttgtttagattttaataattcaatttgactttctatgtcttttattttatcaagattaacactttttttaacttcagctaattctctttttaatgcgtcaatgttttctgcaccagtatttgatttaattatattaatttcatttgtgtttcgtcctacactatctttagtagcgtttaaagattgtgtaagtgtttcatatttatcatcatactttaacattgatttttcaaattcatttaattgtgtttgatgttgttctaaactttcatttaatatgacatttttttcttttaatgaatcaatgtcttttttattactatcaatcattggttggaatttttttattttctctagaaatgttgatattttttctttgttatcattaattgcaatatcatgatgttctatttgaccactgtatttattaatcaatgtttttaaatcattataaaatgttaatttataataaccagtatcagtacggacataaatatgtccgtctgatgtactgattaagtcattttcttctgttaaaaaatctgctaacctgtctattgtttcaacttgtcttaaacttcttacgattctatcagccattgttcacacctcttatttgtatcgtttccaactaaactcaaagaaaaaacctaaaatacccattatgagaaaaccccccaaggaataccaacactataactattacccgttttaccgttccattttcttactggtaaataataacgtgtaccttgccagttgtaaccaatccatacatacccatctgataaacaaacttcgtcatatggtgtataaccatttggttggaaccaatatccattaggttcacttaatttaggactacctacacgtgcaaatattggtaaaaatccacatgtaaatgttgcattttcatttctgtaatatgtgccatattggttttgtttccattttccgaatgtgtttacttttgatgtttctaattcgttgctgttactagcagaaaatttaggtctaataaagtgtgttacaccgtcataataatgtgttcttattgttgctttttcccaaccgtcaaacccaccacctaaccagttttgctctaaacatgtataataatctaaattaccacttaacacacattgaatatgtccatattgtccatctgtatatacaccaacatcccctaattgtggtttaaagttcggtgtattttcatacaccattgctaaacctttaaagtcattattgattgcgtctttagcgttaccccacatacgaactttaccgtctgtaatgtaatatatataagcaacagctaagtcagcgcattgataaccaaatgctaaatcaaagtccacacctacaccctcatgcttatatatccattcttttgcttgttgttgtgatttcatgaaacattatcctttcttaacccaactatattgacgtttttttgtatctgcattaacgttactaaagaattctttatgttcggacacattagcctctaatgtttgtcttacttcaccgacagcgttaccacttgaaacacgtaaccatgcacccacttttttaatttcttctggtgcgtctctaaacaattccatttggttaccagtaatataatattcaccaggtgtcgtaacgtaagctatccagttattgtattgacttgcttctaaatactcttgatatggtgcgtctgttttgattgttgtccataaaccataatcccattttaatgtaaatacatcgagcgtcataccacgcatgattttaaccatttttcgaccagtagaaaaacgcgttaattcttgtactgtacctaatgtttgtgttgtagggtatacattgatgaaacaaccagcgtctataatttttttactaccattcattggcatatttttaagtttactagctgtaccaccgtcaatataatagaaccctgcttgtgttaagtcatttaagtcgtcaatatggtctggaattgataacgcacgtccatcgtcttttgttaatttatagttttgtgaacctctcgcacgtaatgcttcaaagtgttcatactcaccaagttgaaagaacccatataaattattgaatcgttttccaccaccgccattagtcatagcaagtaataacgatttacgttttgtttttggattggtataaatacaaataccctccggctctttaaagttatcacgtggaaaattaataccgtcttgatatgataatttaaacggataatcataaatcttttgaccagttgttaatgaatatttaccaatttgaacgtgtgaattaactgaactgttaccacttaaccagtataaatcatcaccatcaacggcaatcccttgcatccatcgattatcattgttttctgaattatcaatcgtcatttctttttctacattatcaatgtgattttttacgtcagctcttgaacgtacctgtattgtcccgtcaccgaatcttaaaacgattttgtcattttcttcatcaattaacggtgtaaacgtgtgtttgtttaaaagtgactgtggtgtataatctgttaaccctttagcctcttctaaatctaaaatataattatctttatatgcgacttgtaacagttttgctacaccgtcatgatgtaaccatattttcatttcaccgttagattgtctttctaaacctattgtagtaccgtgaccaccttgtacaatacgcatactagaaattaagtcaccgctaggcgttaatttattaatccaaaaaccttctgggttttgtgaatctgattgtgtagagtacatttgattcgtttctttatctatgtttatagattggttaacagcattacgaataccaccgaatcccataacaaactttggttcaagctcatttaattcaaaaccattaacaaaacggtcaatgtctttaattaagtctttaacttctgatttaaaatcattcatttgtttcatttctgcaactttaaataatgcaaatgcagatgtaagaccagtactatatttagtaaattcatcatgaataattttatctattgtaccgtcgtttaaccaacctctaaataagtctttcgcttggtctgggaatgctttcattaagtcgtcccaatttttgaaacgtttttttaattcattgtcatagtcccaaatacgacgtgctaatacttcaattagttttgataatcttgaaatataatcataatatgattttgaattggtattataatctgctctatcatcgtaaaacggtgtgtaacgttctctcgttttatatatttcgtctaaaaatggacgaatgtcgtcaaaatatttaaaatcgttttcattatatgccataattttccacctttaccaaatttgtaaaaaacattttttatcaaattcatttaaaattttctttcttaaatcgtatactttatcaatattatcaattaaatactgttttgaaaattgtgtacctttcgcattacctttttgattttgattacgttttgcgttttgattactttcgttacttgatttattcacagttttaccgttgtcaattgtattattatctgcaaatcgtaacgttgtgttatctacatcaatgttaacctcgctttgtggtaatgacgcataagcatttctgttcgctgtcatgccagttgaattgtctaaagatgttgcattttgatttgaggtttcatctgtattgtttgttgtatcttcattatgttctgtaaaaccttgtgattgtagatatttttcaacttcgcttgatgaataaaccacattcaaataatcctcatgtgtgatacatacagtaatcacttgcatgccaaaagcttcaactgtttgtctgttgatttctctatctaaaaagtgtattgtaaatgattttttaaaaagtaagtcagataagtcatctttaagtttaaaacctttaaacactttttcattaacgatggctaaaacgtctttgtcaaacttcaacattttttgcatgaattgaaattcatcatcataaaacgttaatttatcattatttacaaattcattaaaaccttttttaattaattctgatttaataaaatcaaataaagtcattgtatatctagccattgtattcactactttcatcattagacaatgtatctatcattgtgatttctgaagtaacttcatcgtcgtaatacggtttaatatctaaaccataacgttttgataagaatgtaatcggttcacgaccttttaaataaatattactatttgatgtggtaaaacctcggttgctttttgcctcttcgtccgaaacaccgctttccttatccactgctagtgagttaatacctaaatagttacttaattcactaattttattttggtattcgcgtttcatctcagttagtgctggaatcacactattactggttaaatctatgatatcatcatcggcgttaaacataggtgacattttaacaaatggtgcaccgttgtatatttccgatacaagttgattaactgactcatcattaatgtctgatttaaatattttgctaaattttgcttgcataattaatgagaatctagataaaacaacctcagataattcatcagtataatgttctataatttctatatcactattatattgaattggtttattttgcatgacaacaaagttaccactcatacagttatcatatattttatgaatctgtaagcattcatctggtattaaatagtctggaacaatgaaataaatatcatcttttgttaatcgtttttgaaattgaaagttaaagtttgatgaaaaatttggtgcttgattaaagtaagtattatttacgtaaccaagaatcataatttgttcatttcttgctttgccgaccactacattgatgttttgtcttaatgctgattctaattgaataaaatctataccaaccgtatcacgattggtatagttgatgagtagtggtaaaaattccaaataacgattaaacataagacgtttaaatctgttgcgatgttctacaactcttttgttgatttcttttgataattcaacctgtacacctttattatgtttagtcatttatagcacctctattattctgttcttggtgttacatcttggtcagtaattaaaattttattaaagaatgggctaatggctttaaatgaatagtaatgaatccagtgtgtgacttcatcaaattcaccattatagaatggttgttttaacataccttttgtgtaacgtttatatttaattgaattaatatccaaaataaacgcgtataaatctgattttggtttaatttcttcaacattatctttaaactctgatagttttgacacatcataagtgaatactgaaccaactggaattgtatcacctttatgagtttgataatcaccgtaagcacgtaagaaagctactgattcatcacttgatacgacaatatctttagtgactttgaaaacaccacctaggtcgtcaaaactgataacgtggtctgtaaagtcaatccctgctacttggaatgtgttcgcaatctttgtatctaaaagataagattttaagctatcagtcgttaaaataacaatatcttttaattttgaaactgttgtatattgtccgattgcaccacctgaagcacgatgaacttcattatatttagcgctgttgttttgtaagttaagaatagcttcaaaaactttacttgctaaatcttcttttgatgttgctttacgtacatttgattcagataattgattcaatgagtaatcaactaacattgcacgcatttctttttcttctaatacgttaatatcagaaattttctttttatagacacctaatgcataattagtagcgtctgctaatgtttggaaattgaaacgtgtgtcattgttatttaatgtaaatttttgtttcttcacaataccactaccatataacttagtagccatacgtggatagttacgtttcaacattagttcttcatttttagataagtccatgttaataggtactgtatccataattacatattcttcactgtattgacctataaagtcctgctctttagctaaccaattaaaacggttacctaatgcaatatcgattaataacgtttcattaatcttagggaataaaaatttatttacaaatgtttcaaacattgtattagaattatcccacttatcgccaaacgtccatgattttgaataagtatgattaaagtcttgtaatgcagatttagctgactttgcaactaatagtgctgtttcgttttttgtactcttttctgccatgatttattattcctcctcaacatcgccagtaaatgactgttttgaaagtgaatgaatttgtacaccataactatcttcacttttatttgtatcaattgacatattttcatttaattctgttcgtttatttaatcttgaatcttcatatgatgtacccatcatagaacgcatgttgttaccctcgtacatgtttaagttcctcctaatctaaatctaatttatcgacaagttcttcatctgaatagtctttatcattgttatctgtttcttttgattctggttgtggttgtggttgtggttgtggttgttgcatttgtgatgtttcaaaattagtaaatcgttgttctaatgaagcgatacgttgttctaaaacaactgggtctaattttgcacaatcttcatctgttgtagtaggttctaatttgttttcattttcttcttcgattgtttctactgttttatcttcagttgattcttcagttgattcttcagttgattctgaagtttcttcagttgattctgaagtttcttctttgtcgtctggttttacgatttcatcaaattctgtcattttgacacctccaaatattttataactaattatatcatagaatatttaaataagtaaattaaatttattttattttcaaatcataactttgaataaaagtcaatagatacataaattttgtatttaatgaatatgtaataggttagataagttggaaaagtagacgcacagtttttataagtttagtaaagaaatgatatgttaatttataagttttgatttgtataatcgtttattttaaacggtggggaggtgtaaatttacaataactttttc

SEQ ID NO: 93 - DNA, 17962 bp, Rosenblumvirus sp.
  source 1..17962: mol_type = genomic DNA
cctccccaccgtttaaaataaacgattatacaaatcaaaacttataaattaacttatcatttctttactaaacttataaaaactgtgcgtctacttttccaacttatctaacctattacatattcattaaatacaaaatttatgtatctattgacttttattcaaagttatgatttgaaaataaaataaatttaatttacttatttaaatattctatgatataattagttataaaatatttggaggtgtcaaaatgacagaatttgatgaaatcgtaaaaccagacgacaaagaagaaacttcagaatcaactgaagaaacttcagaatcaactgaagaatcaactgaagaatcaactgaagataaaacagtagaaacaatcgaagaagaaaatgaaaacaaattagaacctactacaacagatgaagattgtgcaaaattagacccagttgttttagaacaacgtatcgcttcattagaacaacgatttactaattttgaaacatcacaaatgcaacaaccacaaccacaaccacaaccacaaccagaatcaaaagaaacagataacaatgataaagactattcagatgaagaacttgtcgataaattagatttagattaggaggaacttaaacatgtacgagggtaacaacatgcgttctatgatgggtacatcatatgaagattcaagattaaataaacgaacagaattaaatgaaaatatgtcaattgatacaaataaaagtgaagatagttatggtgtacaaattcattcactttcaaaacagtcatttactggcgatgttgaggaggaataataaatcatggcagaaaagagtacaaaaaacgaaacagcactattagttgcaaagtcagctaaatctgcattacaagactttaatcatacttattcaaaatcatggacgtttggcgataagtgggataattctaatacaatgtttgaaacatttgtaaataaatttttattccctaagattaatgaaacgttattaatcgatattgcattaggtaaccgttttaattggttagctaaagagcaggactttataggtcaatacagtgaagaatatgtaattatggatacagtacctattaacatggacttatctaaaaatgaagaactaatgttgaaacgtaactatccacgtatggctactaagttatatggtagtggtattgtgaagaaacaaaaatttacattaaataacaatgacacacgtttcaatttccaaacattagcagacgctactaattatgcattaggtgtctataaaaagaaaatttctgatattaacgtattagaagaaaaagaaatgcgtgcaatgttagttgattactcattgaatcaattatctgaatcaaatgtacgtaaagcaacatcaaaagaagatttagcaagtaaagtttttgaagctattcttaacttacaaaacaacagcgctaaatataatgaagttcatcgtgcttcaggtggtgcaatcggacaatatacaacagtttcaaaattaaaagatattgttattttaacgactgatagcttaaaatcttatcttttagatacaaagattgcgaacacattccaagtagcagggattgactttacagaccacgttatcagttttgacgacctaggtggtgttttcaaagtcactaaagatattgtcgtatcaagtgatgaatcagtagctttcttacgtgcttacggtgattatcaaactcataaaggtgatacaattccagttggttcagtattcacttatgatgtgtcaaaactatcagagtttaaagataatgttgaagaaattaaaccaaaatcagatttatacgcgtttattttggatattaattcaattaaatataaacgttacacaaaaggtatgttaaaacaaccattctataatggtgaatttgatgaagtcacacactggattcattactattcatttaaagccattagcccattctttaataaaattttaattactgaccaagatgtaacaccaagaacagaataatagaggtgctataaatgactaaacataataaaggtgtacaggttgaattatcaaaagaaatcaacaaaagagttgtagaacatcgcaacagatttaaacgtcttatgtttaatcgttatttggaatttttaccactactcatcaactataccaatcgtgatacggttggtatagattttattcaattagaatcagcattaagacaaaacatcaatgtagtggtcggcaaagcaagaaatgaacaaattatgattcttggttacgtaaataatacttactttaatcaagcaccaaatttttcatcaaactttaactttcaatttcaaaaacgattaacaaaagatgatatttatttcattgttccagactatttaataccagatgaatgcttacagattcataaaatatatgataactgtatgagtggtaactttgttgtcatgcaaaataaaccaattcaatataatagtgatatagaaattatagaacattatactgatgaattatctgaggttgttttatctagattctcattaattatgcaagcaaaatttagcaaaatatttaaatcagacattaatgatgagtcagttaatcaacttgtatcggaaatatacaacggtgcaccatttgttaaaatgtcacctatgtttaacgccgatgatgatatcatagatttaaccagtaatagtgtgattccagcactaactgagatgaaacgcgaataccaaaataaaattagtgaattaagtaactatttaggtattaactcactagcagtggataaggaaagcggtgtttcggacgaagaggcaaaaagcaaccgaggttttaccacatcaaatagtaatatttatttaaaaggtcgtgaaccgattacattcttatcaaaacgttatggtttagatattaaaccgtattacgacgatgaagttacttcagaaatcacaatgatagatacattgtctaatgatgaaagtagtgaatacaatggctagatatacaatgactttatttgattttattaaatcagaattaattaaaaaaggttttaatgaatttgtaaataatgataaattaacgttttatgatgatgaatttcaattcatgcaaaaaatgttgaagtttgacaaagacgttttagccatcgttaatgaaaaagtgtttaaaggttttaaacttaaagatgacttatctgacttactttttaaaaaatcatttacaatacactttttagatagagaaatcaacagacaaacagttgaagcttttggcatgcaagtgattactgtatgtatcacacatgaggattatttgaatgtggtttattcatcaagcgaagttgaaaaatatctacaatcacaaggttttacagaacataatgaagatacaacaaacaatacagatgaaacctcaaatcaaaatgcaacatctttagacaattcaactggcatgacagcgaacagaaatgcttatgcgtcattaccacaaagcgaggttaacattgatgtagataacacaacgttacgatttgcagataataatacaattgacaacggtaaaactgtgaataaatcaagtaacgaaagtaatcaaaacgcaaaacgtaatcaaaatcaaaaaggtaatgcgaaaggtacacaattttcaaaacagtatttaattgataatattgataaagtatacgatttaagaaagaaaattttaaatgaatttgataaaaaatgttttttacaaatttggtaaaggtggaaaattatggcatataatgaaaacgattttaaatattttgacgacattcgtccatttttagacgaaatatataaaacgagagaacgttacacaccgttttacgatgatagagcagattataataccaattcaaaatcatattatgattatatttcaagattatcaaaactaattgaagtattagcacgtcgtatttgggactatgacaatgaattaaaaaaacgtttcaaaaattgggacgacttaatgaaagcattcccagaccaagcgaaagacttatttagaggttggttaaacgacggtacaatagataaaattattcatgatgaatttactaaatatagtactggtcttacatctgcatttgcattatttaaagttgcagaaatgaaacaaatgaatgattttaaatcagaagttaaagacttaattaaagacattgaccgttttgttaatggttttgaattaaatgagcttgaaccaaagtttgttatgggattcggtggtattcgtaatgctgttaaccaatctataaacatagataaagaaacgaatcaaatgtactctacacaatcagattcacaaaacccagaaggtttttggattaataaattaacgcctagcggtgacttaatttctagtatgcgtattgtacaaggtggtcacggtactacaataggtttagaaagacaatctaacggtgaaatgaaaatatggttacatcatgacggtgtagcaaaactgttacaagtcgcatataaagataattatattttagatttagaagaggctaaagggttaacagattatacaccacagtcacttttaaacaaacacacgtttacaccgttaattgatgaagaaaatgacaaaatcgttttaagattcggtgacgggacaatacaggtacgttcaagagctgacgtaaaaaatcacattgataatgtagaaaaagaaatgacgattgataattcagaaaacaatgataatcgatggatgcaagggattgccgttgatggtgatgatttatactggttaagtggtaacagttcagttaattcacacgttcaaattggtaaatattcattaacaactggtcaaaagatttatgattatccgtttaaattatcatatcaagacggtattaattttccacgtgataactttaaagagccggagggtatttgtatttataccaatccaaaaacaaaacgtaaatcgttattacttgctatgactaatggcggtggtggaaaacgattcaataatttatatgggttctttcaacttggtgagtatgaacactttgaagcattacgtgcgagaggttcacaaaactataaattaacaaaagacgatggacgtgcgttatcaattccagaccatattgacgacttaaatgacttaacacaagcagggttctattatattgacggtggtacagctagtaaacttaaaaatatgccaatgaatggtagtaaaaaaattatagacgctggttgtttcatcaatgtataccctacaacacaaacattaggtacagtacaagaattaacgcgtttttctactggtcgaaaaatggttaaaatcatgcgtggtatgacgctcgatgtatttacattaaaatgggattatggtttatggacaacaatcaaaacagacgcaccatatcaagagtatttagaagcaagtcaatacaataactggatagcttacgttacgacacctggtgaatattatattactggtaaccaaatggaattgtttagagacgcaccagaagaaattaaaaaagtgggtgcatggttacgtgtttcaagtggtaacgctgtcggtgaagtaagacaaacattagaggctaatgtgtccgaacataaagaattctttagtaacgttaatgcagatacaaaaaaacgtcaatatagttgggttaagaaaggataatgtttcatgaaatcacaacaacaagcaaaagaatggatatataagcatgagggtgtaggtgtggactttgatttagcatttggttatcaatgcgctgacttagctgttgcttatatatattacattacagacggtaaagttcgtatgtggggtaacgctaaagacgcaatcaataatgactttaaaggtttagcaatggtgtatgaaaatacaccgaactttaaaccacaattaggggatgttggtgtatatacagatggacaatatggacatattcaatgtgtgttaagtggtaatttagattattatacatgtttagagcaaaactggttaggtggtgggtttgacggttgggaaaaagcaacaataagaacacattattatgacggtgtaacacactttattagacctaaattttctgctagtaacagcaacgaattagaaacatcaaaagtaaacacattcggaaaatggaaacaaaaccaatatggcacatattacagaaatgaaaatgcaacatttacatgtggatttttaccaatatttgcacgtgtaggtagtcctaaattaagtgaacctaatggatattggttccaaccaaatggttatacaccatatgacgaagtttgtttatcagatgggtatgtatggattggttacaactggcaaggtacacgttattatttaccagtaagaaaatggaacggtaaaacgggtaatagttatagtgttggtattccttggggggttttctcataatgggtattttaggttttttctttgagtttagttggaaacgatacaaataagaggtgtgaacaatggctgatagaatcgtaagaagtttaagacaagttgaaacaatagacaggttagcagattttttaacagaagaaaatgacttaatcagtacatcagacggacatatttatgtccgtactgatactggttattataaattaacattttataatgatttaaaaacattgattaataaatacagtggtcaaatagaacatcatgatattgcaattaatgataacaaagaaaaaatatcaacatttctagagaaaataaaaaaattccaaccaatgattgatagtaataaaaaagacattgattcattaaaagaaaaaaatgtcatattaaatgaaagtttagaacaacatcaaacacaattaaatgaatttgaaaaatcaatgttaaagtatgatgataaatatgaaacacttacacaatctttaaacgctactaaagatagtgtaggacgaaacacaaatgaaattaatataattaaatcaaatactggtgcagaaaacattgacgcattaaaaagagaattagctgaagttaaaaaaagtgttaatcttgataaaataaaagacatagaaagtcaaattgaattattaaaatctaaacaaaacaatgacaacacaattcaagaaatacaagaggatattaataagttaaaacaaaattcaagttctgggaaacttgaaagtttagaacaaaccattaatgacatcaaagcaaataccaaccttgataagataaaagagttagaaacaaaattaaacagtattaaccaaaaagattatacacaggatattaattcaattaaatctgacatcgctactttaaaaacaaataatgataaaatatcaaaaattgaaaaagttattcaagaattaaaagacagaccagttgttgacggaaacggtcatattgatttatcaaaatatgataatgatattagtgatttaaaacaaaaaacatcaacaaacgaatcaagtataagcgttttatcaacaaaagtggataacttaaatatagatactaaaattgcacaatctaaatcagaaattgaacaaaattttgatcaaaaaattaacagtgcaaaattacaatttaatgatacaggttggcaagatgtgcaacttgaaagtggtattgttgcaagtgatagcaacgggggttatcccgcaccgcaatatcgtattgtaacaattaatggtgttaaaaccatacaattaaaaggggtattaaaagggattaagaaaaacggtgatattaaattaggtacgattaacgcaaacttaaaatcaacacatcactacacacaatgtgcgattgataataaaatgatgaatacaagattatatttaaactttaataatgaattacattttgttacatcaaattatagcgatagtgacttaacaaatggagataaacgttttgcaatagatacacaaatcattgaataaaaatgttataatagtcgtataaattatttatacgactattttttatggaggtaaaaatgagaaaattaacaaattttaaatttttctataacacaccgtttacagactatcaaaatacaattcattttaatagtaataaagagcgtgatgattattttttaaacggtcgtcattttaaatcattagactattccaaacaaccgtataattttatacgtgatagaatggaaatcaatgttgatatgcagtggcatgacgcacaagggattaactacatgacgtttttatcagattttgaggatagacgctattacgcttttgtgaatcaaatcgaatatgtgaatgatgttgtggtaaaaatatattttgtgattgatactattatgacgtatacacaaggtaatgtattagaacaactttcaaacgttaatattgaacgtcaacacttatcaaagcgtacgtataactatatgttgccgatgttacgtaacaatgatgatgtgttaaaagtatcaaataaaaactatgtgtataaccaaatgcaacagtatttggaaaatttagtgttattccagtcaagcgctgatttatcaaagaaatttggtacgaaaaaagagccaaacttagatacgtctaaaggtacgatatatgacaatatcacatcgccagtcaacttatacgttatggaatatggtgactttattaactttatggataaaatgagtgcatatccatggattacacaaaactttcaaaaggttcaaatgttacctaaagattttattaatacaaaagatttagaggacgttaagacaagtgaaaaaattactggattaaagacattaaaacagggtggaaaatcaaaagaatggagtttaaacgatttatcattaagtttcacaaagcttcaagagatgatgttgtctaaaaaagacgagtttaaacatatgatacgtaatgagtacatgacgattgaattttatgactggaacggtaacacaatgttacttgacgctggtaaaatttcacaaaaaacaggtgttaagttacgtacaaaatccatcattggttatcataatgaagtgcgagtatatccagttgattataacagtgctgaaaacgatagaccgatacttgctaaaaataaagatatattaattgatacaggttcattcttaaataccaatataacatttaatagttttgcgcaagtgcctatattaattaataacggaattttaggacaatcacaacaagccaatagacagcgtaatgcagaaagtcaattaatcacaagtcgtatagataatgtattaaatggtagtgacccaaaatcacgtttttatgacgctgtaagtgtagcaagtaatttaagtccaaccgctttatttggtaagtttaatgaagaatataatttctacaaacaacaacaggcagaatataaagatttagccttacaaccaccatctgtgacagaatcagaaatgggaaacgcattccaaattgcaaatagcattaacggtttaacgatgaaaattagtgtaccgtcacctaaagaaattacatttttacaaaaatattatatgttgtttggttttgaagtaaatgactataatacattcattgaacctattaacagcatgactgtatgcaactatttaaaatgtacaggtacgtataccatacgtgacattgaccctatgttaatggaacaattaaaagcaattttagaatctggtgtgagattttggcataatgacggttcaggtaatccaatgttacagaacccgttaaataataaatttagagaaggtgtataaaatgaatgaggtaaaattaagatttacggacacagaagcatttcatatgttcatatatgcaggtgatttaaagttactatattttttatttgttttgatgattatagatgttgttactggttttgctaaagcaattaaaaataataatctatggtctaaaaaatcaatgaaaggttttgctaaaaaattattgatattctgtattatcattttagctaacatcattgaccagattttacaattaaaaggtggtttactcatgattacgattttctattatatcgcaaatgagggactatctattgttgaaaattgtgctgaaatggacgtattagtgcctgaacaaattaaagataaattaagagtaattaaaaacgattctgaaaagggtgataataatgaacgaccaagagaagatagataaatttacgcattcgtatattaatgatgatttcggtttaacgatagaccagttagtccctaaagtaaaagggtatggacgctttaatgtatggctaggtggtaatgaaagtaaaatcagacaagtattaaaagcagtaaaagagataggtgtgtcacctactctttttgctgtatatgaaaaaaatgaagggtatagcgctggtttaggttggttgaaccatacatctgcacgaggtgactatttaacagacgctaaattcattgcaagaaaattagtatcacaatcaaaacaagcaggacaaccgtcttggtatgacgcaggtaacatcgttcactttgtacctcaagacgtacaaagaaaaggtaatgcagattttgctaaaaatatgaaagcaggtacaatcggacgtgcgtatattccattaacagcagcggctacttgggcggcatattatcccctaggtttgaaagcgtcatataataaagtacaaaactatggtaatccttttttagacggtgcaaatactattttagcatggggtggtaaattagacggtaaaggtggttcacctagtgattcgtctgacagtggtagtagtggtgacagtggtagttcactgctcgctttagcaaaacaagccatgcaagaattattaaaaaaagtacaagacgcattacaatgggatgtacacagtattggtagtgataaattttttagtaatgattattttacattacaaaaaacatttaacaacacatatcatattaaaatgacgattgggctacttgattcattaaaaaaactgattgatagtgtgcaagtagatagtggggatagtagttcaaaccctactgatgatgacggggaccataaaccaattagtggtaagtcagtcaaaccaaatggtaaaagtggacgcgtcattggtggtaactggacgtatgcacagttaccagaaaaatataaaaaagcaattggtgtacctttattcaaaaaagaatacttgtacaaaccaggtaacatatttcctcaaacgggtaatgcaggacaatgtacagaattaacatgggcatatatgtcacaattacatggtaaaagacaaccaacagacgacggtcaaataacaaacggtcaacgtgtgtggtacgtatataaaaagttaggtgcaaaaacaacacataatccaacagtagggtatggtttttcaagtaaaccaccatacttacaagcaacagcatatggcattggtcacacaggtgtcgttgtagcagtatttgacgatggttcattcttagtagcaaactataacgtcccaccatacgtggcaccgtcacgggttgtattatatacattgattaatggtgtacctcataacgctggtgataatattgtattcttcagtggtattgcttaattaactatgctataatgaaaacatgctagtaatgctagtaaataaaatacaaaacataatcaattttcgtacacatttttcatgttatatcaaaagaaaaaggcgactgttatttaacagttgcctttttttaattcatcgtgttcacgttttaatatatgcaaattagatttattatgcactgaacgtacaactggaaataagtcattaagtgagaatgaaccgatgtcactttcaatataaagaatatcatcaaattgactatggtcaaaattttctctagcgtcttttaagataaattcacgtttcatattaagttcatcagtaaaatattcatcatatacattaccgcatacaatttctgttttagacggataaatcgatatcgtaccctgttcgttatagatacttttattgttttctattatcacaccgtcaaagaattgttcacgtacaaaggtttcaaaatcgacgcttgtatcaaaggcgcttttcggtataccagcagaagcaattttaatctttccattcacttcatatgcatattttttatgattcagtacaaacatcttatctatctgttcgttttcaatatcccatttacctaaggctatcgggtcgaataaactggggttcaataagggtttaacaacggatttcatatacaaactatcagtatcgcaataaataaaattgtcgtcaatttcattttcagttaagtattggaaaggtaccaataagttatataatgaacgtgatgtgacaaatgtagagaataatatattacgttcagtgtttttgtaaccgttaatgatattatatagttcgttgttatcatctaaacggaataagttaaaatgtgaacgtaatgcaggtatgccatataatccgttaagtacaactttagacaacataacctcctcatttgagtaagggtgttcgttgatgtcatcagtaatatgatagtcgtaaggtgatgtcatgttgattttgttttttaacttaccttgtgttttaataaaatagttttgaaatataatatcacgtgcatgaaagtattcacattcatatatcacaaacgaattaacacgtatatgcgtgcaatcaatacccgtaatgtcttgaatcattcttaatgtatttgtattaatattaacgtaatcattatcattattatagtattttacaatcatttgacgtaatacacgtgatttgattttaattaataaatcattgttaaatacatctttatcaatcttatataatgaaaaataattgtcatcatctaaaaaagtagggattaatgtaggttctgaataatgttcataaaagtataaccatgtcggaattttctcatgatacatcacataaggataactggaattgatatcaatagaaaaacaaggctcatcaataagtttgtttatgtatttagtgttatacatatttaaaccaccacgataaaatgatttgatataatcataaaaattcatatcatggaaatgataatgtgtatatgatattttaatatcttgatattgattgagtaactgaaaacgcgtcatttgattatttaaatacgattccataatattcaatgaaaatgttaatttgttatagtcaaaatttggaaatatatcactataatgaatatggcacatacctaatataataacgtcattatgaatgtatgtaagttgttcaggtgtgagtttagcaaaacactttacggcatagtcataggcttcactatctgacatgtcgttatctttatcaaatatcgtgtaattaaaatctgttttaagttggtcgtctgttaaataaccaccgtcaagcaactttttacctaatgttgcaattgatgtatttgttttcataaagttatcaataatattaaatttaaatccatttaaaaacattgttaagtctaaattaatagacgatttcacacgtttttctaaaatcacattttgatttttagctaaaatagtagcctcttgcatctttagtgtgtgttcgttttcttctgcagattttaaatatatattttcacgtgtgatattatcaaaataacgcatggtatctttaagtaaaaaatggttgtcatacttattacagttatgtgcaatcatgataatatctgtttttgacttagtgattgtatcacgtcgtttcacatacgtataaaatgcgtcataaaacgattcaaaactaggaaatacttctacatcaatctcataaccattaaaccaaccaattgctactgaatacgttacgtttttatatttggttggtttttttcgtccgttaactttattgtacgctaatgtttctatatcccagtataaaatcattcgacgttcatgtttatgatattgcatgcattctagtaatcccataatcttacacaccttttataagccgtattgtttcattaaatacttctttgtattttcaatatagttatcttcatatattttttcttttctttcaaattcactcatatttttcttcatttcattttttatatgaaattttataattttattcatatctaaatataaatatctatcattatcaacaacgtaattttttgagtaagcgttatcaaaatgtaaattgcttggattgtaataataacgctccatgttttctttataaaacatatcttctcttaaataaataacattgtcatctatatctttgattttagtacaaaattcatattgttttgtataaggtataacaataatattagcattaaatgtatcaacattatacataatttttatatatttatcgtcagttttaatatagaaaaaatcaccgttttgattgatatgatttcttaaattatcatctgccaaattatattcgttaaattcaaactcgccagtagtcatagcgtcatcgtttgaattgaatgcccgtgtgttacgcttttcatttacgtaatcgtttcttcgcatttctaaaaaaatgtttttgtaaagtcgtgatgtgttcattttatgtttttgtaataagttatatatatttaaattggataatataggacttgaaaagttgactgcattacctagtaaaaacattttaggaaagccaatataatcaacattaccatggttacggtcgattgattcataaattgtttttaacttatcccactcgtcaattaaatagtcatcttcaagtgctaaaaattcatcatatataatgatagggtagtgttttaaaaagttagaatgatattttaaatcagttgcactattcaaatctgtaatcacaccgatttccttatcttgatagatgatagctaaatagtccctagcgcttctgaatgtgacacgcttagatttgaatagtgggtttttgtctatgatttcctcaataaaatcacgataagcgtcacgtaatgtataatgacgtgataataaagtaaatttaatatcaagttttatagctaaataaataaagaatgaaacatagttgaacgattttccgtcagaacggtttgaaatagatatgtaatagtctatatcatcattcatgagttcatcaactaattctatttgattatagttatctggtattttttttctgacatgattgacagcattttgataatctcttaccatgtctaaacgattttgtttcaccatgtttttgctccttataatagtttatgatgtcgtttacagtattaaaattactcttcaaatgttgcataatataaaaagttatacctcacatctttatcatcaatagtagtcactggtctgtctgatttaccaatttctttgtataaagtgtcaatttctttaatatatttatacatagaagaattattatttttagcttgtaattcatataaagcatatttatgttttttagcgtttttattattagattcatctttacggttatatatttcaagtatatagtttaattgttcatgtcttttacctcttaccaatgatacggcatttgcatatgacacgtttctttcttttggaaaatagggcaaatgtgcgaaatgtttccatgtgtctatgtacgcctcttgtaaatctttatcatcaaatttaaaattaacagtactaaaatcatttaaaaacaattctttttcctgctcttttcttgcgtctctttcttttttccatttatccatttcggacgtatgtctaaccattgctaacgacctccatataacccatatataaccactaaaaagataatgtagaatataatcaatgtagtaaataaaacaccaaatgacacacgtatatgcattgtcataagtattacaagtgtaattaaaaatgctaaaaggaaaataatagctatgtttaatatattagtcatgttctatcacgttcccgttattatatatcactttgttttgaaaaattattgttatattactttctattggtttctcgaaatattctaatacgtcatcaatagtacaatccataaaaacttcttttttatataatgggtttaaatgttctcgataaaaaacctcaagacaactaaaactatatgtacgaacatcaacgtcaatgtctaaagtaaataaatcattgtattttgtatcactatcatagtattcaatagaaatttcaccgtatctaacaaaaacaacacattttccacttagtgattcaaattttgttattttattcataaaacaatctctattatctaaaatataattaattaatttttttgtgtttaatattgttgtaatattcattttatatctccttaatgtattttacacaaagattatatgcaccttttttgtaaaagtttgcgtcaaaataactatatattaccttaactttatttattttttcgaattgttcaatttcatgttcatatgtttcattaattgatacattgtataataatacggcagtgtatattttttccattgtttagcacctcataaaaataggggataaatatcccctataaaattgtattaaaatgatactggaccaaagttgattgagtaacctttttgaccttttttgttttcatattcataaattgtaaattgcacttcaccagcattgataatgttaacaacgtcctcgtcttgacgcatgtctttaattaattcagttaagtgattcggtaagtttacgttatagtcgtcagtgacgataacaccttgttcaccgaattttgattctttgtttgtgaataatgctctaacgatatactcttttttcataccgtatttttctactaattctgatagtttaataaattctctttctttttcctcaaattcaaatctcgctaatgtgttttggtgtcttgataaaatatcttttacgtttgtcatttttatttctcctcttatttaaattatttgctttctggaattgaaatttgtagtaaatcattgtaataaacttgaattgttttcgttgtgcgtgtagtggataaaagtttgtgtgaattaggtaataaatcttttgcttgtgtttttgataaatgatactcatgaagtggaataaattcttcaacatattcatttttatcatctaaatagtgaagaatataacctttaattcgtaatgtaacaatatcatcaggtttcattattatatcactcctttctaaaaaacgtaaacgttatacgtttcataaaatcctttgtgcatattccattgttctattgggtcatcaccagcaatgtaagataaaatagattctggtttagtttcgttgtttagttcatcatttaagaattgaacaacagaactattatagtttaataatagttgttggcaagccgatactaagttaattgcattgtcgaaagtataagctggattccattgaataagtttattgaatagttgcaacatttcagtatatgcttgacctttttctgcaggtgcattatcaacattaaccattattatcactccttaaatcattgatttcattccttaattcatcaacgatttttttaggtgaattatggtctaattgttcaaaatcgtccttttcaagtacaaataatgttaattcataagttgatgtattacccataacaataactatattaccattttttaaaatgtaagtttgtaaaggttgtacattttccattttgttacctccttgatttgattacatacatagtatagcaaacgtttaaaagttttgtcaatggtttttcttaaaaagtttaaataatttaaaaatactatttaatagaagaaattagattttaaatacaaatcataattttgaataaaagtcaatagatacatatattt

SEQ ID NO: 94 - DNA, 18139 bp, Rosenblumvirus sp.
  source 1..18139: mol_type = genomic DNA
gaaaaagtttttgtaaaattacacctccccaccgtttaaaataaacgattatacaaatcaaaacttataaattaacttatcatttctttactaaacttataaaaactgtgcttctacttttccaacttatcaaacctataacatattcataaaatacaaaatatatgtatctattgacttttattcaaaattatgatttgtatttaaaatctaatttcttctattaaatagtatttttaaattatttaaactttttaagaaaaaccattgacaaaacttttaaacgtttgctatactatgtatgtaatcaaatcaaggaggtaacaaaatggaaaatgtacaacctttacaaacttacattttaaaaaatggtaatatagttattgttatgggtaatacatcaacttatgaattaacattatttgtacttgaaaaggacgattttgaacaattagaccataattcacctaaaaaaatcgttgatgaattaaggaatgaaatcaatgatttaaggagtgataataatggttaatgttgataatgcacctgcagaaaaaggtcaagcatatactgaaatgttgcaactattcaataaacttattcaatggaatccagcttatactttcgacaatgcaattaacttagtatcggcttgccaacaactattattaaactataatagttctgttgttcaattcttaaatgatgaactaaacaacgaaactaaaccagaatctattttatcttacattgctggtgatgacccaatagaacaatggaatatgcacaaaggattttatgaaacgtataacgtttacgttttttagaaaggagtgatataataatgaaacctgatgatattgttacattacgaattaaaggttatattcttcactatttagatgataaaaatgaatatgttgaagaatttattccacttcatgagtatcatttatcaaaaacacaagcaaaagatttattacctaattcacacaaacttttatccactacacgcacaacgaaaacaattcaagtttattacaatgatttactacaaatttcaattccagaaagcaaataatttaaataagaggagaaataaaaatgacaaacgtaaaagatattttatcaagacaccaaaacacattagcgagatttgaatttgaggaaaaagaaagagaatttattaaactatcagaattagtagaaaaatacggtatgaaaaaagagtatatcgttagagcattattcacaaacaaagaatcaaaattcggtgaacaaggtgttatcgtcactgacgactataacgtaaacttaccgaatcacttaactgaattaattaaagacatgcgtcaagacgaggacgttgttaacattatcaatgctggtgaagtgcaatttacaatttatgaatatgaaaacaaaaaaggtcaaaaaggttactcaatcaactttggtccagtatcattttaatacaattttataggggatatttatcccctatttttatgaggtgctaaacaatggaaaaaatatacactgccgtattattatacaatgtatcaattaatgaaacatatgaacatgaaattgaacaattcgaaaaaataaataaagttaaggtaatatatagttattttgacgcaaacttttacaaaaaaggtgcatataatctttgtgtaaaatacattaaggagatataaaatgaatattacaacaatattaaacacaaaaaaattaattaattatattttagataatagagattgttttatgaataaaataacaaaatttgaatcactaagtggaaaatgtgttgtttttgttagatacggtgaaatttctattgaatactatgatagtgatacaaaatacaatgatttatttactttagacattgacgttgatgttcgtacatatagttttagttgtcttgaggttttttatcgagaacatttaaacccattatataaaaaagaagtttttatggattgtactattgatgacgtattagaatatttcgagaaaccaatagaaagtaatataacaataatttttcaaaacaaagtgatatataataacgggaacgtgatagaacatgactaatatattaaacatagctattattttccttttagcatttttaattacacttgtaatacttatgacaatgcatatacgtgtgtcatttggtgttttatttactacattgattatattctacattatctttttagtggttatatatgggttatatggaggtcgttagcaatggttagacatacgtccgaaatggataaatggaaaaaagaaagagacgcaagaaaagagcaggaaaaagaattgtttttaaatgattttagtactgttaattttaaatttgatgataaagatttacaagaggcgtacatagacacatggaaacatttcgcacatttgccctattttccaaaagaaagaaacgtgtcatatgcaaatgccgtatcattggtaagaggtaaaagacatgaacaattaaactatatacttgaaatatataaccgtaaagatgaatctaataataaaaacgctaaaaaacataaatatgctttatatgaattacaagctaaaaataataattcttctatgtataaatatattaaagaaattgacactttatacaaagaaattggtaaatcagacagaccagtgactactattgatgataaagatgtgaggtataactttttatattatgcaacatttgaagagtaattttaatactgtaaacgacatcataaactattataaggagcaaaaacatggtgaaacaaaatcgtttagacatggtaagagattatcaaaatgctgtcaatcatgtcagaaaaaaaataccagataactataatcaaatagaattagttgatgaactcatgaatgatgatatagactattacatatctatttcaaaccgttctgacggaaaatcgttcaactatgtttcattctttatttatttagctataaaacttgatattaaatttactttattatcacgtcattatacattacgtgacgcttatcgtgattttattgaggaaatcatagacaaaaacccactattcaaatctaagcgtgtcacattcagaagcgctagggactatttagctatcatctatcaagataaggaaatcggtgtgattacagatttgaatagtgcaactgatttaaaatatcattctaactttttaaaacactaccctatcattatatatgatgaatttttagcacttgaagatgactatttaattgacgagtgggataagttaaaaacaatttatgaatcaatcgaccgtaaccatggtaatgttgattatattggctttcctaaaatgtttttactaggtaatgcagtcaacttttcaagtcctatattatccaatttaaatatatataacttattacaaaaacataaaatgaacacatcacgactttacaaaaacatttttttagaaatgcgaagaaacgattacgtaaatgaaaagcgtaacacacgggcattcaattcaaacgatgacgctatgactactggcgagtttgaatttaacgaatataatttggcagatgataatttaagaaatcatatcaatcaaaacggtgattttttctatattaaaactgacgataaatatataaaaattatgtataatgttgatacatttaatgctaatattattgttataccttatacaaaacaatatgaattttgtactaaaatcaaagatatagatgacaatgttatttatttaagagaagatatgttttataaagaaaacatggagcgttattattacaatccaagcaatttacattttgataacgcttactcaaaaaattacgttgttgataatgatagatatttatatttagatatgaataaaattataaaatttcatataaaaaatgaaatgaagaaaaatatgagtgaatttgaaagaaaagaaaaaatatatgaagataactatattgaaaatacaaagaagtatttaatgaaacaatacggcttataaaaggtgtgtaagattatgggattactagaatgcatgcaatatcataaacatgaacgtcgaatgattttatactgggatatagaaacattagcgtacaataaagttaacggacgaaaaaaaccaaccaaatataaaaacgtaacgtattcagtagcaattggttggtttaatggttatgagattgatgtagaagtatttcctagttttgaatcgttttatgacgcattttatacgtatgtgaaacgacgtgatacaatcactaagtcaaaaacagatattatcatgattgcacataactgtaataagtatgacaaccattttttacttaaagataccatgcgttattttgataatatcacacgtgaaaatatatatttaaaatctgcagaagaaaacgaacacacactaaagatgcaagaggctactattttagctaaaaatcaaaatgtgattttagaaaaacgtgtgaaatcgtctattaatttagacttaacaatgtttttaaatggatttaaatttaatattattgataactttatgaaaacaaatacatcaattgcaacattaggtaaaaagttgcttgacggtggttatttaacagacgaccaacttaaaacagattttaattacacgatatttgataaagataacgacatgtcagatagtgaagcctatgactatgccgtaaagtgttttgctaaactcacacctgaacaacttacatacattcataatgacgttattatattaggtatgtgccatattcattatagtgatatatttccaaattttgactataacaaattaacattttcattgaatattatggaatcgtatttaaataatcaaatgacgcgttttcagttactcaatcaatatcaagatattaaaatatcatatacacattatcatttccatgatatgaatttttatgattatatcaaatcattttatcgtggtggtttaaatatgtataacactaaatacataaacaaacttattgatgagccttgtttttctattgatatcaattccagttatccttatgtgatgtatcatgagaaaattccgacatggttatacttttatgaacattattcagaacctacattaatccctacttttttagatgatgacaattatttttcattatataagattgataaagatgtatttaacaatgatttattaattaaaatcaaatcacgtgtattacgtcaaatgattgtaaaatactataataatgataatgattacgttaatattaatacaaatacattaagaatgattcaagacattacgggtattgattgcacgcatatacgtgttaattcgtttgtgatatatgaatgtgaatactttcatgcacgtgatattatatttcaaaactattttattaaaacacaaggtaagttaaaaaacaaaatcaacatgacatcaccttacgactatcatattactgatgacatcaacgaacacccttactcaaatgaggaggttatgttgtctaaagttgtacttaacggattatatggcatacctgcattacgttcacattttaacttattccgtttagatgataacaacgaactatataatatcattaacggttacaaaaacactgaacgtaatatattattctctacatttgtcacatcacgttcattatataacttattggtacctttccaatacttaactgaaaatgaaattgacgacaattttatttattgcgatactgatagtttgtatatgaaatccgttgttaaacccttattgaaccccagtttattcgacccgatagccttaggtaaatgggatattgaaaacgaacagatagataagatgtttgtactgaatcataaaaaatatgcatatgaagtgaatggaaagattaaaattgcttctgctggtataccgaaaagcgcctttgatacaagcgtcgattttgaaacctttgtacgtgaacaattctttgacggtgtgataatagaaaacaataaaagtatctataacgaacagggtacgatatcgatttatccgtctaaaacagaaattgtatgcggtaatgtatatgatgaatattttactgatgaacttaatatgaaacgtgaatttatcttaaaagacgctagagaaaattttgaccatagtcaatttgatgatattctttatattgaaagtgacatcggttcattctcacttaatgacttatttccagttgtacgttcagtgcataataaatctaatttgcatatattaaaacgtgaacacgatgaattaaaaaaaggcaactgttaaataacagtcgcctttttcttttgatataacatgaaaaatgtgtacgaaaattgattatgttttgtattttatttactagcattactagcatgttttcattatagcatagttaattaagcaataccactgaagaatacaatattatcaccagcgttatgaggtacaccattaatcaatgtatataatacaacccgtgacggtgccacgtatggtgggacgttatagtttgctactaagaatgaaccatcgtcaaatactgctacaacgacacctgtgtgaccaatgccatatgctgttgcttgtaagtatggtggtttacttgaaaaaccataccctactgttggattatgtgttgtttttgcacctaactttttatatacgtaccacacacgttgaccgtttgttatttgaccgtcgtctgttggttgtcttttaccatgtaattgtgacatatatgcccatgttaattctgtacattgtcctgcattacccgtttgaggaaatatgttacctggtttgtacaagtattcttttttgaataaaggtacaccaattgcttttttatatttttctggtaactgtgcatacgtccagttaccaccaatgacgcgtccacttttaccatttggtttgactgacttaccactaattggtttatggtccccgtcatcatcagtagggtttgaactactatccccactatctacttgcacactatcaatcagtttttttaatgaatcaagtagcccaatcgtcattttaatatgatatgtgttgttaaatgttttttgtaatgtaaaataatcattactaaaaaatttatcactaccaatactgtgtacatcccattgtaatgcgtcttgtactttttttaataattcttgcatggcttgttttgctaaagcgagcagtgaactaccactgtcaccactactaccactgtcagacgaatcactaggtgaaccacctttaccgtctaatttaccaccccatgctaaaatagtatttgcaccgtctaaaaaaggattaccatagttttgtactttattatatgacgctttcaaacctaggggataatatgccgcccaagtagccgctgctgttaatggaatatacgcacgtccgattgtacctgctttcatatttttagcaaaatctgcattaccttttctttgtacgtcttgaggtacaaagtgaacgatgttacctgcgtcataccaagacggttgtcctgcttgttttgattgtgatactaattttcttgcaatgaatttagcgtctgttaaatagtcacctcgtgcagatgtatggttcaaccaacctaaaccagcgctatacccttcatttttttcatatacagcaaaaagagtaggtgacacacctatctcttttactgcttttaatacttgtctgattttactttcattaccacctagccatacattaaagcgtccatacccttttactttagggactaactggtctatcgttaaaccgaaatcatcattaatatacgaatgcgtaaatttatctatcttctcttggtcgttcattattatcacccttttcagaatcgtttttaattactcttaatttatctttaatttgttcaggcactaatacgtccatttcagcacaattttcaacaatagatagtccctcatttgcgatataatagaaaatcgtaatcatgagtaaaccaccttttaattgtaaaatctggtcaatgatgttagctaaaatgataatacagaatatcaataattttttagcaaaacctttcattgattttttagaccatagattattatttttaattgctttagcaaaaccagtaacaacatctataatcatcaaaacaaataaaaaatatagtaactttaaatcacctgcatatatgaacatatgaaatgcttctgtgtccgtaaatcttaattttacctcattcattttatacaccttctctaaatttattatttaacgggttctgtaacattggattacctgaaccgtcattatgccaaaatctcacaccagattctaaaattgcttttaattgttccattaacatagggtcaatgtcacgtatggtatacgtacctgtacattttaaatagttgcatacagtcatgctgttaataggttcaatgaatgtattatagtcatttacttcaaaaccaaacaacatataatatttttgtaaaaatgtaatttctttaggtgacggtacactaattttcatcgttaaaccgttaatgctatttgcaatttggaatgcgtttcccatttctgattctgtcacagatggtggttgtaaggctaaatctttatattctgcctgttgttgtttgtagaaattatattcttcattaaacttaccaaataaagcggttggacttaaattacttgctacacttacagcgtcataaaaacgtgattttgggtcactaccatttaatacattatctatacgacttgtgattaattgactttctgcattacgctgtctattggcttgttgtgattgtcctaaaattccgttattaattaatataggcacttgcgcaaaactattaaatgttatattggtatttaagaatgaacctgtatcaattaatatatctttatttttagcaagtatcggtctatcgttttcagcactgttataatcaactggatatactcgcacttcattatgataaccaatgatggattttgtacgtaacttaacacctgttttttgtgaaattttaccagcgtcaagtaacattgtgttaccgttccagtcataaaattcaatcgtcatgtactcattacgtatcatatgtttaaactcgtcttttttagacaacatcatctcttgaagctttgtgaaacttaatgataaatcgtttaaactccattcttttgattttccaccctgttttaatgtctttaatccagtaattttttcacttgtcttaacgtcctctaaatcttttgtattaataaaatctttaggtaacatttgaaccttttgaaagttttgtgtaatccatggatatgcactcattttatccataaagttaataaagtcaccatattccataacgtataagttgactggcgatgtgatattgtcatatatcgtacctttagacgtatctaagtttggctcttttttcgtaccaaatttctttgataaatcagcgcttgactggaataacactaaattttccaaatactgttgcatttggttatacacatagtttttatttgatacttttaacacatcatcattgttacgtaacatcggcaacatatagttatacgtacgctttgataagtgttgacgttcaatattaacgtttgaaagttgttctaatacattaccttgtgtatacgtcataatagtatcaatcacaaaatatatttttaccacaacatcattcacatattcgatttgattcacaaaagcgtaatagcgtctatcctcaaaatctgataaaaacgtcatgtagttaatcccttgtgcgtcatgccactgcatatcaacattgatttccattctatcacgtataaaattatacggttgtttggaatagtctaatgatttaaaatgacgaccgtttaaaaaataatcatcacgctctttattactattaaaatgaattgtattttgatagtctgtaaacggtgtgttatagaaaaatttaaaatttgttaattttctcatttttacctccataaaaaatagtcgtataaataatttatacgactattataacatttttattcaatgatttgtgtatctattgcaaaacgtttatctccatttgttaagtcactatcgctataatttgatgtaacaaaatgtaattcattattaaagtttaaatataatcttgtattcatcattttattatcaatcgcacattgtgtgtagtgatgtgttgattttaagtttgcgttaatcgtacctaatttaatatcaccgtttttcttaatcccttttaataccccttttaattgtatggttttaacaccattaattgttacaatacgatattgcggtgcgggataacccccgttgctatcacttgcaacaataccactttcaagttgcacatcttgccaacctgtatcattaaattgtaattttgcactgttaattttttgatcaaaattttgttcaatttctgatttagattgtgcaattttagtatctatatttaagttatccacttttgttgataaaacgcttatacttgattcgtttgttgatgttttttgttttaaatcactaatatcattatcatattttgataaatcaatatgaccgtttccgtcaacaactggtctgtcttttaattcttgaataactttttcaatttttgatattttatcattatttgtttttaaagtagcgatgtcagatttaattgaattaatatcctgtgtataatctttttggttaatactgtttaattttgtttctaactcttttatcttatcaaggttggtatttgctttgatgtcattaatggtttgttctaaactttcaagtttcccagaacttgaattttgttttaacttattaatatcctcttgtatttcttgaattgtgttgtcattgttttgtttagattttaataattcaatttgactttctatgtcttttattttatcaagattaacactttttttaacttcagctaattctctttttaatgcgtcaatgttttctgcaccagtatttgatttaattatattaatttcatttgtgtttcgtcctacactatctttagtagcgtttaaagattgtgtaagtgtttcatatttatcatcatactttaacattgatttttcaaattcatttaattgtgtttgatgttgttctaaactttcatttaatatgacatttttttcttttaatgaatcaatgtcttttttattactatcaatcattggttggaatttttttattttctctagaaatgttgatattttttctttgttatcattaattgcaatatcatgatgttctatttgaccactgtatttattaatcaatgtttttaaatcattataaaatgttaatttataataaccagtatcagtacggacataaatatgtccgtctgatgtactgattaagtcattttcttctgttaaaaaatctgctaacctgtctattgtttcaacttgtcttaaacttcttacgattctatcagccattgttcacacctcttatttgtatcgtttccaactaaactcaaagaaaaaacctaaaatacccattatgagaaaaccccccaaggaataccaacactataactattacccgttttaccgttccattttcttactggtaaataataacgtgtaccttgccagttgtaaccaatccatacatacccatctgataaacaaacttcgtcatatggtgtataaccatttggttggaaccaatatccattaggttcacttaatttaggactacctacacgtgcaaatattggtaaaaatccacatgtaaatgttgcattttcatttctgtaatatgtgccatattggttttgtttccattttccgaatgtgtttacttttgatgtttctaattcgttgctgttactagcagaaaatttaggtctaataaagtgtgttacaccgtcataataatgtgttcttattgttgctttttcccaaccgtcaaacccaccacctaaccagttttgctctaaacatgtataataatctaaattaccacttaacacacattgaatatgtccatattgtccatctgtatatacaccaacatcccctaattgtggtttaaagttcggtgtattttcatacaccattgctaaacctttaaagtcattattgattgcgtctttagcgttaccccacatacgaactttaccgtctgtaatgtaatatatataagcaacagctaagtcagcgcattgataaccaaatgctaaatcaaagtccacacctacaccctcatgcttatatatccattcttttgcttgttgttgtgatttcatgaaacattatcctttcttaacccaactatattgacgtttttttgtatctgcattaacgttactaaagaattctttatgttcggacacattagcctctaatgtttgtcttacttcaccgacagcgttaccacttgaaacacgtaaccatgcacccacttttttaatttcttctggtgcgtctctaaacaattccatttggttaccagtaatataatattcaccaggtgtcgtaacgtaagctatccagttattgtattgacttgcttctaaatactcttgatatggtgcgtctgttttgattgttgtccataaaccataatcccattttaatgtaaatacatcgagcgtcataccacgcatgattttaaccatttttcgaccagtagaaaaacgcgttaattcttgtactgtacctaatgtttgtgttgtagggtatacattgatgaaacaaccagcgtctataatttttttactaccattcattggcatatttttaagtttactagctgtaccaccgtcaatataatagaaccctgcttgtgttaagtcatttaagtcgtcaatatggtctggaattgataacgcacgtccatcgtcttttgttaatttatagttttgtgaacctctcgcacgtaatgcttcaaagtgttcatactcaccaagttgaaagaacccatataaattattgaatcgttttccaccaccgccattagtcatagcaagtaataacgatttacgttttgtttttggattggtataaatacaaataccctccggctctttaaagttatcacgtggaaaattaataccgtcttgatatgataatttaaacggataatcataaatcttttgaccagttgttaatgaatatttaccaatttgaacgtgtgaattaactgaactgttaccacttaaccagtataaatcatcaccatcaacggcaatcccttgcatccatcgattatcattgttttctgaattatcaatcgtcatttctttttctacattatcaatgtgattttttacgtcagctcttgaacgtacctgtattgtcccgtcaccgaatcttaaaacgattttgtcattttcttcatcaattaacggtgtaaacgtgtgtttgtttaaaagtgactgtggtgtataatctgttaaccctttagcctcttctaaatctaaaatataattatctttatatgcgacttgtaacagttttgctacaccgtcatgatgtaaccatattttcatttcaccgttagattgtctttctaaacctattgtagtaccgtgaccaccttgtacaatacgcatactagaaattaagtcaccgctaggcgttaatttattaatccaaaaaccttctgggttttgtgaatctgattgtgtagagtacatttgattcgtttctttatctatgtttatagattggttaacagcattacgaataccaccgaatcccataacaaactttggttcaagctcatttaattcaaaaccattaacaaaacggtcaatgtctttaattaagtctttaacttctgatttaaaatcattcatttgtttcatttctgcaactttaaataatgcaaatgcagatgtaagaccagtactatatttagtaaattcatcatgaataattttatctattgtaccgtcgtttaaccaacctctaaataagtctttcgcttggtctgggaatgctttcattaagtcgtcccaatttttgaaacgtttttttaattcattgtcatagtcccaaatacgacgtgctaatacttcaattagttttgataatcttgaaatataatcataatatgattttgaattggtattataatctgctctatcatcgtaaaacggtgtgtaacgttctctcgttttatatatttcgtctaaaaatggacgaatgtcgtcaaaatatttaaaatcgttttcattatatgccataattttccacctttaccaaatttgtaaaaaacattttttatcaaattcatttaaaattttctttcttaaatcgtatactttatcaatattatcaattaaatactgttttgaaaattgtgtacctttcgcattacctttttgattttgattacgttttgcgttttgattactttcgttacttgatttattcacagttttaccgttgtcaattgtattattatctgcaaatcgtaacgttgtgttatctacatcaatgttaacctcgctttgtggtaatgacgcataagcatttctgttcgctgtcatgccagttgaattgtctaaagatgttgcattttgatttgaggtttcatctgtattgtttgttgtatcttcattatgttctgtaaaaccttgtgattgtagatatttttcaacttcgcttgatgaataaaccacattcaaataatcctcatgtgtgatacatacagtaatcacttgcatgccaaaagcttcaactgtttgtctgttgatttctctatctaaaaagtgtattgtaaatgattttttaaaaagtaagtcagataagtcatctttaagtttaaaacctttaaacactttttcattaacgatggctaaaacgtctttgtcaaacttcaacattttttgcatgaattgaaattcatcatcataaaacgttaatttatcattatttacaaattcattaaaaccttttttaattaattctgatttaataaaatcaaataaagtcattgtatatctagccattgtattcactactttcatcattagacaatgtatctatcattgtgatttctgaagtaacttcatcgtcgtaatacggtttaatatctaaaccataacgttttgataagaatgtaatcggttcacgaccttttaaataaatattactatttgatgtggtaaaacctcggttgctttttgcctcttcgtccgaaacaccgctttccttatccactgctagtgagttaatacctaaatagttacttaattcactaattttattttggtattcgcgtttcatctcagttagtgctggaatcacactattactggttaaatctatgatatcatcatcggcgttaaacataggtgacattttaacaaatggtgcaccgttgtatatttccgatacaagttgattaactgactcatcattaatgtctgatttaaatattttgctaaattttgcttgcataattaatgagaatctagataaaacaacctcagataattcatcagtataatgttctataatttctatatcactattatattgaattggtttattttgcatgacaacaaagttaccactcatacagttatcatatattttatgaatctgtaagcattcatctggtattaaatagtctggaacaatgaaataaatatcatcttttgttaatcgtttttgaaattgaaagttaaagtttgatgaaaaatttggtgcttgattaaagtaagtattatttacgtaaccaagaatcataatttgttcatttcttgctttgccgaccactacattgatgttttgtcttaatgctgattctaattgaataaaatctataccaaccgtatcacgattggtatagttgatgagtagtggtaaaaattccaaataacgattaaacataagacgtttaaatctgttgcgatgttctacaactcttttgttgatttcttttgataattcaacctgtacacctttattatgtttagtcatttatagcacctctattattctgttcttggtgttacatcttggtcagtaattaaaattttattaaagaatgggctaatggctttaaatgaatagtaatgaatccagtgtgtgacttcatcaaattcaccattatagaatggttgttttaacataccttttgtgtaacgtttatatttaattgaattaatatccaaaataaacgcgtataaatctgattttggtttaatttcttcaacattatctttaaactctgatagttttgacacatcataagtgaatactgaaccaactggaattgtatcacctttatgagtttgataatcaccgtaagcacgtaagaaagctactgattcatcacttgatacgacaatatctttagtgactttgaaaacaccacctaggtcgtcaaaactgataacgtggtctgtaaagtcaatccctgctacttggaatgtgttcgcaatctttgtatctaaaagataagattttaagctatcagtcgttaaaataacaatatcttttaattttgaaactgttgtatattgtccgattgcaccacctgaagcacgatgaacttcattatatttagcgctgttgttttgtaagttaagaatagcttcaaaaactttacttgctaaatcttcttttgatgttgctttacgtacatttgattcagataattgattcaatgagtaatcaactaacattgcacgcatttctttttcttctaatacgttaatatcagaaattttctttttatagacacctaatgcataattagtagcgtctgctaatgtttggaaattgaaacgtgtgtcattgttatttaatgtaaatttttgtttcttcacaataccactaccatataacttagtagccatacgtggatagttacgtttcaacattagttcttcatttttagataagtccatgttaataggtactgtatccataattacatattcttcactgtattgacctataaagtcctgctctttagctaaccaattaaaacggttacctaatgcaatatcgattaataacgtttcattaatcttagggaataaaaatttatttacaaatgtttcaaacattgtattagaattatcccacttatcgccaaacgtccatgattttgaataagtatgattaaagtcttgtaatgcagatttagctgactttgcaactaatagtgctgtttcgttttttgtactcttttctgccatgatttattattcctcctcaacatcgccagtaaatgactgttttgaaagtgaatgaatttgtacaccataactatcttcacttttatttgtatcaattgacatattttcatttaattctgttcgtttatttaatcttgaatcttcatatgatgtacccatcatagaacgcatgttgttaccctcgtacatgtttaagttcctcctaatctaaatctaatttatcgacaagttcttcatctgaatagtctttatcattgttatctgtttcttttgattctggttgtggttgtggttgtggttgtggttgttgcatttgtgatgtttcaaaattagtaaatcgttgttctaatgaagcgatacgttgttctaaaacaactgggtctaattttgcacaatcttcatctgttgtagtaggttctaatttgttttcattttcttcttcgattgtttctactgttttatcttcagttgattcttcagttgattcttcagttgattctgaagtttcttcagttgattctgaagtttcttctttgtcgtctggttttacgatttcatcaaattctgtcattttgacacctccaaatattttataactaattatatcatagaatatttaaataagtaaattaaatttattttattttcaaatcataactttgaataaaagtcaatagatacataaattttgtatttaatgaatatgtaataggttagataagttggaaaagtagacgcacagtttttataagtttagtaaagaaatgatatgttaatttataagttttgatttgtataatcgtttattttaaacggtggggaggtgtaaatttacaataactt

SEQ ID NO: 95 - DNA, 18061 bp, Rosenblumvirus sp.
  source 1..18061: mol_type = genomic DNA
atcatttctttactaaacttataaaaactgtgcgtctacttttccaacttatctaacctattacatattcattaaatacaaaatttatgtatctattgacttttattcaaagttatgatttgaaaataaaataaatttaatttacttatttaaatattctatgatataattagttataaaatatttggaggtgtcaaaatgacagaatttgatgaaatcgtaaaaccagacgacaaagaagaaacttcagaatcaactgaagaaacttcagaatcaactgaagaatcaactgaagaatcaactgaagataaaacagtagaaacaatcgaagaagaaaatgaaaacaaattagaacctactacaacagatgaagattgtgcaaaattagacccagttgttttagaacaacgtatcgcttcattagaacaacgatttactaattttgaaacatcacaaatgcaacaaccacaaccacaaccacaaccacaaccagaatcaaaagaaacagataacaatgataaagactattcagatgaagaacttgtcgataaattagatttagattaggaggaacttaaacatgtacgagggtaacaacatgcgttctatgatgggtacatcatatgaagattcaagattaaataaacgaacagaattaaatgaaaatatgtcaattgatacaaataaaagtgaagatagttatggtgtacaaattcattcactttcaaaacagtcatttactggcgatgttgaggaggaataataaatcatggcagaaaagagtacaaaaaacgaaacagcactattagttgcaaagtcagctaaatctgcattacaagactttaatcatacttattcaaaatcatggacgtttggcgataagtgggataattctaatacaatgtttgaaacatttgtaaataaatttttattccctaagattaatgaaacgttattaatcgatattgcattaggtaaccgttttaattggttagctaaagagcaggactttataggtcaatacagtgaagaatatgtaattatggatacagtacctattaacatggacttatctaaaaatgaagaactaatgttgaaacgtaactatccacgtatggctactaagttatatggtagtggtattgtgaagaaacaaaaatttacattaaataacaatgacacacgtttcaatttccaaacattagcagacgctactaattatgcattaggtgtctataaaaagaaaatttctgatattaacgtattagaagaaaaagaaatgcgtgcaatgttagttgattactcattgaatcaattatctgaatcaaatgtacgtaaagcaacatcaaaagaagatttagcaagtaaagtttttgaagctattcttaacttacaaaacaacagcgctaaatataatgaagttcatcgtgcttcaggtggtgcaatcggacaatatacaacagtttcaaaattaaaagatattgttattttaacgactgatagcttaaaatcttatcttttagatacaaagattgcgaacacattccaagtagcagggattgactttacagaccacgttatcagttttgacgacctaggtggtgttttcaaagtcactaaagatattgtcgtatcaagtgatgaatcagtagctttcttacgtgcttacggtgattatcaaactcataaaggtgatacaattccagttggttcagtattcacttatgatgtgtcaaaactatcagagtttaaagataatgttgaagaaattaaaccaaaatcagatttatacgcgtttattttggatattaattcaattaaatataaacgttacacaaaaggtatgttaaaacaaccattctataatggtgaatttgatgaagtcacacactggattcattactattcatttaaagccattagcccattctttaataaaattttaattactgaccaagatgtaacaccaagaacagaataatagaggtgctataaatgactaaacataataaaggtgtacaggttgaattatcaaaagaaatcaacaaaagagttgtagaacatcgcaacagatttaaacgtcttatgtttaatcgttatttggaatttttaccactactcatcaactataccaatcgtgatacggttggtatagattttattcaattagaatcagcattaagacaaaacatcaatgtagtggtcggcaaagcaagaaatgaacaaattatgattcttggttacgtaaataatacttactttaatcaagcaccaaatttttcatcaaactttaactttcaatttcaaaaacgattaacaaaagatgatatttatttcattgttccagactatttaataccagatgaatgcttacagattcataaaatatatgataactgtatgagtggtaactttgttgtcatgcaaaataaaccaattcaatataatagtgatatagaaattatagaacattatactgatgaattatctgaggttgttttatctagattctcattaattatgcaagcaaaatttagcaaaatatttaaatcagacattaatgatgagtcagttaatcaacttgtatcggaaatatacaacggtgcaccatttgttaaaatgtcacctatgtttaacgccgatgatgatatcatagatttaaccagtaatagtgtgattccagcactaactgagatgaaacgcgaataccaaaataaaattagtgaattaagtaactatttaggtattaactcactagcagtggataaggaaagcggtgtttcggacgaagaggcaaaaagcaaccgaggttttaccacatcaaatagtaatatttatttaaaaggtcgtgaaccgattacattcttatcaaaacgttatggtttagatattaaaccgtattacgacgatgaagttacttcagaaatcacaatgatagatacattgtctaatgatgaaagtagtgaatacaatggctagatatacaatgactttatttgattttattaaatcagaattaattaaaaaaggttttaatgaatttgtaaataatgataaattaacgttttatgatgatgaatttcaattcatgcaaaaaatgttgaagtttgacaaagacgttttagccatcgttaatgaaaaagtgtttaaaggttttaaacttaaagatgacttatctgacttactttttaaaaaatcatttacaatacactttttagatagagaaatcaacagacaaacagttgaagcttttggcatgcaagtgattactgtatgtatcacacatgaggattatttgaatgtggtttattcatcaagcgaagttgaaaaatatctacaatcacaaggttttacagaacataatgaagatacaacaaacaatacagatgaaacctcaaatcaaaatgcaacatctttagacaattcaactggcatgacagcgaacagaaatgcttatgcgtcattaccacaaagcgaggttaacattgatgtagataacacaacgttacgatttgcagataataatacaattgacaacggtaaaactgtgaataaatcaagtaacgaaagtaatcaaaacgcaaaacgtaatcaaaatcaaaaaggtaatgcgaaaggtacacaattttcaaaacagtatttaattgataatattgataaagtatacgatttaagaaagaaaattttaaatgaatttgataaaaaatgttttttacaaatttggtaaaggtggaaaattatggcatataatgaaaacgattttaaatattttgacgacattcgtccatttttagacgaaatatataaaacgagagaacgttacacaccgttttacgatgatagagcagattataataccaattcaaaatcatattatgattatatttcaagattatcaaaactaattgaagtattagcacgtcgtatttgggactatgacaatgaattaaaaaaacgtttcaaaaattgggacgacttaatgaaagcattcccagaccaagcgaaagacttatttagaggttggttaaacgacggtacaatagataaaattattcatgatgaatttactaaatatagtactggtcttacatctgcatttgcattatttaaagttgcagaaatgaaacaaatgaatgattttaaatcagaagttaaagacttaattaaagacattgaccgttttgttaatggttttgaattaaatgagcttgaaccaaagtttgttatgggattcggtggtattcgtaatgctgttaaccaatctataaacatagataaagaaacgaatcaaatgtactctacacaatcagattcacaaaacccagaaggtttttggattaataaattaacgcctagcggtgacttaatttctagtatgcgtattgtacaaggtggtcacggtactacaataggtttagaaagacaatctaacggtgaaatgaaaatatggttacatcatgacggtgtagcaaaactgttacaagtcgcatataaagataattatattttagatttagaagaggctaaagggttaacagattatacaccacagtcacttttaaacaaacacacgtttacaccgttaattgatgaagaaaatgacaaaatcgttttaagattcggtgacgggacaatacaggtacgttcaagagctgacgtaaaaaatcacattgataatgtagaaaaagaaatgacgattgataattcagaaaacaatgataatcgatggatgcaagggattgccgttgatggtgatgatttatactggttaagtggtaacagttcagttaattcacacgttcaaattggtaaatattcattaacaactggtcaaaagatttatgattatccgtttaaattatcatatcaagacggtattaattttccacgtgataactttaaagagccggagggtatttgtatttataccaatccaaaaacaaaacgtaaatcgttattacttgctatgactaatggcggtggtggaaaacgattcaataatttatatgggttctttcaacttggtgagtatgaacactttgaagcattacgtgcgagaggttcacaaaactataaattaacaaaagacgatggacgtgcgttatcaattccagaccatattgacgacttaaatgacttaacacaagcagggttctattatattgacggtggtacagctagtaaacttaaaaatatgccaatgaatggtagtaaaaaaattatagacgctggttgtttcatcaatgtataccctacaacacaaacattaggtacagtacaagaattaacgcgtttttctactggtcgaaaaatggttaaaatcatgcgtggtatgacgctcgatgtatttacattaaaatgggattatggtttatggacaacaatcaaaacagacgcaccatatcaagagtatttagaagcaagtcaatacaataactggatagcttacgttacgacacctggtgaatattatattactggtaaccaaatggaattgtttagagacgcaccagaagaaattaaaaaagtgggtgcatggttacgtgtttcaagtggtaacgctgtcggtgaagtaagacaaacattagaggctaatgtgtccgaacataaagaattctttagtaacgttaatgcagatacaaaaaaacgtcaatatagttgggttaagaaaggataatgtttcatgaaatcacaacaacaagcaaaagaatggatatataagcatgagggtgtaggtgtggactttgatttagcatttggttatcaatgcgctgacttagctgttgcttatatatattacattacagacggtaaagttcgtatgtggggtaacgctaaagacgcaatcaataatgactttaaaggtttagcaatggtgtatgaaaatacaccgaactttaaaccacaattaggggatgttggtgtatatacagatggacaatatggacatattcaatgtgtgttaagtggtaatttagattattatacatgtttagagcaaaactggttaggtggtgggtttgacggttgggaaaaagcaacaataagaacacattattatgacggtgtaacacactttattagacctaaattttctgctagtaacagcaacgaattagaaacatcaaaagtaaacacattcggaaaatggaaacaaaaccaatatggcacatattacagaaatgaaaatgcaacatttacatgtggatttttaccaatatttgcacgtgtaggtagtcctaaattaagtgaacctaatggatattggttccaaccaaatggttatacaccatatgacgaagtttgtttatcagatgggtatgtatggattggttacaactggcaaggtacacgttattatttaccagtaagaaaatggaacggtaaaacgggtaatagttatagtgttggtattccttggggggttttctcataatgggtattttaggttttttctttgagtttagttggaaacgatacaaataagaggtgtgaacaatggctgatagaatcgtaagaagtttaagacaagttgaaacaatagacaggttagcagattttttaacagaagaaaatgacttaatcagtacatcagacggacatatttatgtccgtactgatactggttattataaattaacattttataatgatttaaaaacattgattaataaatacagtggtcaaatagaacatcatgatattgcaattaatgataacaaagaaaaaatatcaacatttctagagaaaataaaaaaattccaaccaatgattgatagtaataaaaaagacattgattcattaaaagaaaaaaatgtcatattaaatgaaagtttagaacaacatcaaacacaattaaatgaatttgaaaaatcaatgttaaagtatgatgataaatatgaaacacttacacaatctttaaacgctactaaagatagtgtaggacgaaacacaaatgaaattaatataattaaatcaaatactggtgcagaaaacattgacgcattaaaaagagaattagctgaagttaaaaaaagtgttaatcttgataaaataaaagacatagaaagtcaaattgaattattaaaatctaaacaaaacaatgacaacacaattcaagaaatacaagaggatattaataagttaaaacaaaattcaagttctgggaaacttgaaagtttagaacaaaccattaatgacatcaaagcaaataccaaccttgataagataaaagagttagaaacaaaattaaacagtattaaccaaaaagattatacacaggatattaattcaattaaatctgacatcgctactttaaaaacaaataatgataaaatatcaaaaattgaaaaagttattcaagaattaaaagacagaccagttgttgacggaaacggtcatattgatttatcaaaatatgataatgatattagtgatttaaaacaaaaaacatcaacaaacgaatcaagtataagcgttttatcaacaaaagtggataacttaaatatagatactaaaattgcacaatctaaatcagaaattgaacaaaattttgatcaaaaaattaacagtgcaaaattacaatttaatgatacaggttggcaagatgtgcaacttgaaagtggtattgttgcaagtgatagcaacgggggttatcccgcaccgcaatatcgtattgtaacaattaatggtgttaaaaccatacaattaaaaggggtattaaaagggattaagaaaaacggtgatattaaattaggtacgattaacgcaaacttaaaatcaacacatcactacacacaatgtgcgattgataataaaatgatgaatacaagattatatttaaactttaataatgaattacattttgttacatcaaattatagcgatagtgacttaacaaatggagataaacgttttgcaatagatacacaaatcattgaataaaaatgttataatagtcgtataaattatttatacgactattttttatggaggtaaaaatgagaaaattaacaaattttaaatttttctataacacaccgtttacagactatcaaaatacaattcattttaatagtaataaagagcgtgatgattattttttaaacggtcgtcattttaaatcattagactattccaaacaaccgtataattttatacgtgatagaatggaaatcaatgttgatatgcagtggcatgacgcacaagggattaactacatgacgtttttatcagattttgaggatagacgctattacgcttttgtgaatcaaatcgaatatgtgaatgatgttgtggtaaaaatatattttgtgattgatactattatgacgtatacacaaggtaatgtattagaacaactttcaaacgttaatattgaacgtcaacacttatcaaagcgtacgtataactatatgttgccgatgttacgtaacaatgatgatgtgttaaaagtatcaaataaaaactatgtgtataaccaaatgcaacagtatttggaaaatttagtgttattccagtcaagcgctgatttatcaaagaaatttggtacgaaaaaagagccaaacttagatacgtctaaaggtacgatatatgacaatatcacatcgccagtcaacttatacgttatggaatatggtgactttattaactttatggataaaatgagtgcatatccatggattacacaaaactttcaaaaggttcaaatgttacctaaagattttattaatacaaaagatttagaggacgttaagacaagtgaaaaaattactggattaaagacattaaaacagggtggaaaatcaaaagaatggagtttaaacgatttatcattaagtttcacaaagcttcaagagatgatgttgtctaaaaaagacgagtttaaacatatgatacgtaatgagtacatgacgattgaattttatgactggaacggtaacacaatgttacttgacgctggtaaaatttcacaaaaaacaggtgttaagttacgtacaaaatccatcattggttatcataatgaagtgcgagtatatccagttgattataacagtgctgaaaacgatagaccgatacttgctaaaaataaagatatattaattgatacaggttcattcttaaataccaatataacatttaatagttttgcgcaagtgcctatattaattaataacggaattttaggacaatcacaacaagccaatagacagcgtaatgcagaaagtcaattaatcacaagtcgtatagataatgtattaaatggtagtgacccaaaatcacgtttttatgacgctgtaagtgtagcaagtaatttaagtccaaccgctttatttggtaagtttaatgaagaatataatttctacaaacaacaacaggcagaatataaagatttagccttacaaccaccatctgtgacagaatcagaaatgggaaacgcattccaaattgcaaatagcattaacggtttaacgatgaaaattagtgtaccgtcacctaaagaaattacatttttacaaaaatattatatgttgtttggttttgaagtaaatgactataatacattcattgaacctattaacagcatgactgtatgcaactatttaaaatgtacaggtacgtataccatacgtgacattgaccctatgttaatggaacaattaaaagcaattttagaatctggtgtgagattttggcataatgacggttcaggtaatccaatgttacagaacccgttaaataataaatttagagaaggtgtataaaatgaatgaggtaaaattaagatttacggacacagaagcatttcatatgttcatatatgcaggtgatttaaagttactatattttttatttgttttgatgattatagatgttgttactggttttgctaaagcaattaaaaataataatctatggtctaaaaaatcaatgaaaggttttgctaaaaaattattgatattctgtattatcattttagctaacatcattgaccagattttacaattaaaaggtggtttactcatgattacgattttctattatatcgcaaatgagggactatctattgttgaaaattgtgctgaaatggacgtattagtgcctgaacaaattaaagataaattaagagtaattaaaaacgattctgaaaagggtgataataatgaacgaccaagagaagatagataaatttacgcattcgtatattaatgatgatttcggtttaacgatagaccagttagtccctaaagtaaaagggtatggacgctttaatgtatggctaggtggtaatgaaagtaaaatcagacaagtattaaaagcagtaaaagagataggtgtgtcacctactctttttgctgtatatgaaaaaaatgaagggtatagcgctggtttaggttggttgaaccatacatctgcacgaggtgactatttaacagacgctaaattcattgcaagaaaattagtatcacaatcaaaacaagcaggacaaccgtcttggtatgacgcaggtaacatcgttcactttgtacctcaagacgtacaaagaaaaggtaatgcagattttgctaaaaatatgaaagcaggtacaatcggacgtgcgtatattccattaacagcagcggctacttgggcggcatattatcccctaggtttgaaagcgtcatataataaagtacaaaactatggtaatccttttttagacggtgcaaatactattttagcatggggtggtaaattagacggtaaaggtggttcacctagtgattcgtctgacagtggtagtagtggtgacagtggtagttcactgctcgctttagcaaaacaagccatgcaagaattattaaaaaaagtacaagacgcattacaatgggatgtacacagtattggtagtgataaattttttagtaatgattattttacattacaaaaaacatttaacaacacatatcatattaaaatgacgattgggctacttgattcattaaaaaaactgattgatagtgtgcaagtagatagtggggatagtagttcaaaccctactgatgatgacggggaccataaaccaattagtggtaagtcagtcaaaccaaatggtaaaagtggacgcgtcattggtggtaactggacgtatgcacagttaccagaaaaatataaaaaagcaattggtgtacctttattcaaaaaagaatacttgtacaaaccaggtaacatatttcctcaaacgggtaatgcaggacaatgtacagaattaacatgggcatatatgtcacaattacatggtaaaagacaaccaacagacgacggtcaaataacaaacggtcaacgtgtgtggtacgtatataaaaagttaggtgcaaaaacaacacataatccaacagtagggtatggtttttcaagtaaaccaccatacttacaagcaacagcatatggcattggtcacacaggtgtcgttgtagcagtatttgacgatggttcattcttagtagcaaactataacgtcccaccatacgtggcaccgtcacgggttgtattatatacattgattaatggtgtacctcataacgctggtgataatattgtattcttcagtggtattgcttaattaactatgctataatgaaaacatgctagtaatgctagtaaataaaatacaaaacataatcaattttcgtacacatttttcatgttatatcaaaagaaaaaggcgactgttatttaacagttgcctttttttaattcatcgtgttcacgttttaatatatgcaaattagatttattatgcactgaacgtacaactggaaataagtcattaagtgagaatgaaccgatgtcactttcaatataaagaatatcatcaaattgactatggtcaaaattttctctagcgtcttttaagataaattcacgtttcatattaagttcatcagtaaaatattcatcatatacattaccgcatacaatttctgttttagacggataaatcgatatcgtaccctgttcgttatagatacttttattgttttctattatcacaccgtcaaagaattgttcacgtacaaaggtttcaaaatcgacgcttgtatcaaaggcgcttttcggtataccagcagaagcaattttaatctttccattcacttcatatgcatattttttatgattcagtacaaacatcttatctatctgttcgttttcaatatcccatttacctaaggctatcgggtcgaataaactggggttcaataagggtttaacaacggatttcatatacaaactatcagtatcgcaataaataaaattgtcgtcaatttcattttcagttaagtattggaaaggtaccaataagttatataatgaacgtgatgtgacaaatgtagagaataatatattacgttcagtgtttttgtaaccgttaatgatattatatagttcgttgttatcatctaaacggaataagttaaaatgtgaacgtaatgcaggtatgccatataatccgttaagtacaactttagacaacataacctcctcatttgagtaagggtgttcgttgatgtcatcagtaatatgatagtcgtaaggtgatgtcatgttgattttgttttttaacttaccttgtgttttaataaaatagttttgaaatataatatcacgtgcatgaaagtattcacattcatatatcacaaacgaattaacacgtatatgcgtgcaatcaatacccgtaatgtcttgaatcattcttaatgtatttgtattaatattaacgtaatcattatcattattatagtattttacaatcatttgacgtaatacacgtgatttgattttaattaataaatcattgttaaatacatctttatcaatcttatataatgaaaaataattgtcatcatctaaaaaagtagggattaatgtaggttctgaataatgttcataaaagtataaccatgtcggaattttctcatgatacatcacataaggataactggaattgatatcaatagaaaaacaaggctcatcaataagtttgtttatgtatttagtgttatacatatttaaaccaccacgataaaatgatttgatataatcataaaaattcatatcatggaaatgataatgtgtatatgatattttaatatcttgatattgattgagtaactgaaaacgcgtcatttgattatttaaatacgattccataatattcaatgaaaatgttaatttgttatagtcaaaatttggaaatatatcactataatgaatatggcacatacctaatataataacgtcattatgaatgtatgtaagttgttcaggtgtgagtttagcaaaacactttacggcatagtcataggcttcactatctgacatgtcgttatctttatcaaatatcgtgtaattaaaatctgttttaagttggtcgtctgttaaataaccaccgtcaagcaactttttacctaatgttgcaattgatgtatttgttttcataaagttatcaataatattaaatttaaatccatttaaaaacattgttaagtctaaattaatagacgatttcacacgtttttctaaaatcacattttgatttttagctaaaatagtagcctcttgcatctttagtgtgtgttcgttttcttctgcagattttaaatatatattttcacgtgtgatattatcaaaataacgcatggtatctttaagtaaaaaatggttgtcatacttattacagttatgtgcaatcatgataatatctgtttttgacttagtgattgtatcacgtcgtttcacatacgtataaaatgcgtcataaaacgattcaaaactaggaaatacttctacatcaatctcataaccattaaaccaaccaattgctactgaatacgttacgtttttatatttggttggtttttttcgtccgttaactttattgtacgctaatgtttctatatcccagtataaaatcattcgacgttcatgtttatgatattgcatgcattctagtaatcccataatcttacacaccttttataagccgtattgtttcattaaatacttctttgtattttcaatatagttatcttcatatattttttcttttctttcaaattcactcatatttttcttcatttcattttttatatgaaattttataattttattcatatctaaatataaatatctatcattatcaacaacgtaattttttgagtaagcgttatcaaaatgtaaattgcttggattgtaataataacgctccatgttttctttataaaacatatcttctcttaaataaataacattgtcatctatatctttgattttagtacaaaattcatattgttttgtataaggtataacaataatattagcattaaatgtatcaacattatacataatttttatatatttatcgtcagttttaatatagaaaaaatcaccgttttgattgatatgatttcttaaattatcatctgccaaattatattcgttaaattcaaactcgccagtagtcatagcgtcatcgtttgaattgaatgcccgtgtgttacgcttttcatttacgtaatcgtttcttcgcatttctaaaaaaatgtttttgtaaagtcgtgatgtgttcattttatgtttttgtaataagttatatatatttaaattggataatataggacttgaaaagttgactgcattacctagtaaaaacattttaggaaagccaatataatcaacattaccatggttacggtcgattgattcataaattgtttttaacttatcccactcgtcaattaaatagtcatcttcaagtgctaaaaattcatcatatataatgatagggtagtgttttaaaaagttagaatgatattttaaatcagttgcactattcaaatctgtaatcacaccgatttccttatcttgatagatgatagctaaatagtccctagcgcttctgaatgtgacacgcttagatttgaatagtgggtttttgtctatgatttcctcaataaaatcacgataagcgtcacgtaatgtataatgacgtgataataaagtaaatttaatatcaagttttatagctaaataaataaagaatgaaacatagttgaacgattttccgtcagaacggtttgaaatagatatgtaatagtctatatcatcattcatgagttcatcaactaattctatttgattatagttatctggtattttttttctgacatgattgacagcattttgataatctcttaccatgtctaaacgattttgtttcaccatgtttttgctccttataatagtttatgatgtcgtttacagtattaaaattactcttcaaatgttgcataatataaaaagttatacctcacatctttatcatcaatagtagtcactggtctgtctgatttaccaatttctttgtataaagtgtcaatttctttaatatatttatacatagaagaattattatttttagcttgtaattcatataaagcatatttatgttttttagcgtttttattattagattcatctttacggttatatatttcaagtatatagtttaattgttcatgtcttttacctcttaccaatgatacggcatttgcatatgacacgtttctttcttttggaaaatagggcaaatgtgcgaaatgtttccatgtgtctatgtacgcctcttgtaaatctttatcatcaaatttaaaattaacagtactaaaatcatttaaaaacaattctttttcctgctcttttcttgcgtctctttcttttttccatttatccatttcggacgtatgtctaaccattgctaacgacctccatataacccatatataaccactaaaaagataatgtagaatataatcaatgtagtaaataaaacaccaaatgacacacgtatatgcattgtcataagtattacaagtgtaattaaaaatgctaaaaggaaaataatagctatgtttaatatattagtcatgttctatcacgttcccgttattatatatcactttgttttgaaaaattattgttatattactttctattggtttctcgaaatattctaatacgtcatcaatagtacaatccataaaaacttcttttttatataatgggtttaaatgttctcgataaaaaacctcaagacaactaaaactatatgtacgaacatcaacgtcaatgtctaaagtaaataaatcattgtattttgtatcactatcatagtattcaatagaaatttcaccgtatctaacaaaaacaacacattttccacttagtgattcaaattttgttattttattcataaaacaatctctattatctaaaatataattaattaatttttttgtgtttaatattgttgtaatattcattttatatctccttaatgtattttacacaaagattatatgcaccttttttgtaaaagtttgcgtcaaaataactatatattaccttaactttatttattttttcgaattgttcaatttcatgttcatatgtttcattaattgatacattgtataataatacggcagtgtatattttttccattgtttagcacctcataaaaataggggataaatatcccctataaaattgtattaaaatgatactggaccaaagttgattgagtaacctttttgaccttttttgttttcatattcataaattgtaaattgcacttcaccagcattgataatgttaacaacgtcctcgtcttgacgcatgtctttaattaattcagttaagtgattcggtaagtttacgttatagtcgtcagtgacgataacaccttgttcaccgaattttgattctttgtttgtgaataatgctctaacgatatactcttttttcataccgtatttttctactaattctgatagtttaataaattctctttctttttcctcaaattcaaatctcgctaatgtgttttggtgtcttgataaaatatcttttacgtttgtcatttttatttctcctcttatttaaattatttgctttctggaattgaaatttgtagtaaatcattgtaataaacttgaattgttttcgttgtgcgtgtagtggataaaagtttgtgtgaattaggtaataaatcttttgcttgtgtttttgataaatgatactcatgaagtggaataaattcttcaacatattcatttttatcatctaaatagtgaagaatataacctttaattcgtaatgtaacaatatcatcaggtttcattattatatcactcctttctaaaaaacgtaaacgttatacgtttcataaaatcctttgtgcatattccattgttctattgggtcatcaccagcaatgtaagataaaatagattctggtttagtttcgttgtttagttcatcatttaagaattgaacaacagaactattatagtttaataatagttgttggcaagccgatactaagttaattgcattgtcgaaagtataagctggattccattgaataagtttattgaatagttgcaacatttcagtatatgcttgacctttttctgcaggtgcattatcaacattaaccattattatcactccttaaatcattgatttcattccttaattcatcaacgatttttttaggtgaattatggtctaattgttcaaaatcgtccttttcaagtacaaataatgttaattcataagttgatgtattacccataacaataactatattaccattttttaaaatgtaagtttgtaaaggttgtacattttccattttgttacctccttgatttgattacatacatagtatagcaaacgtttaaaagttttgtcaatggtttttcttaaaaagtttaaataatttaaaaatactatttaatagaagaaattagattttaaatacaaatcataattttgaataaaagtcaatagatacatatattttgtattttatgaatatgttataggtttgataagttggaaaagtagaagcacagtttttataagtttagtaaagaaatgataagttaatttataagttttgatttgtataatcgtttattttaaacggtggggaggtgtaattttacaaaaactt

SEQ ID NO: 96 - DNA, 17838 bp, Rosenblumvirus sp.
  source 1..17838: mol_type = genomic DNA
ttgctatactatgtatggaatcaaatcaaggaggtaacaaaatggaaaatgtacaacctttacaaacttacattttaaaaaatggtaatatagttattgttatgggtaatacatcaacttatgaattaacattatttgtacttgaaaaggacgattttgaacaattagaccataattcacctaaaaaaatcgttgatgaattaaggaatgaaatcaatgatttaaggagtgataataatggttaatgttgataatgcacctgcagaaaaaggtcaagcatatactgaaatgttgcaactattcaataaacttattcaatggaatccagcttatactttcgacaatgcaattaacttagtatcggcttgccaacaactattattaaactataatagttctgttgttcaattcttaaatgatgaactaaacaacgaaactaaaccagaatctattttatcttacattgctggtgatgacccaatagaacaatggaatatgcacaaaggattttatgaaacgtataacgtttacgttttttagaaaggagtgatataataatgaaacctgatgatattgttacattacgaattaaaggttatattcttcactatttagatgataaaaatgaatatgttgaagaatttattccacttcatgagtatcatttatcaaaaacacaagcaaaagatttattacctaattcacacaaacttttatccactacacgcacaacgaaaacaattcaagtttattacaatgatttactacaaatttcaattccagaaagcaaataatttaaataagaggagaaataaaaatgacaaacgtaaaagatattttatcaagacaccaaaacacattagcgagatttgaatttgaggaaaaagaaagagaatttattaaactatcagaattagtagaaaaatacggtatgaaaaaagagtatatcgttagagcattattcacaaacaaagaatcaaaattcggtgaacaaggtgttatcgtcactgacgactataacgtaaacttaccgaatcacttaactgaattaattaaagacatgcgtcaagacgaggacgttgttaacattatcaatgctggtgaagtgcaatttacaatttatgaatatgaaaacaaaaaaggtcaaaaaggttactcaatcaactttggtccagtatcattttaatacaattttataggggatatttatcccctatttttatgaggtgctaaacaatggaaaaaatatacactgccgtattattatacaatgtatcaattaatgaaacatatgaacatgaaattgaacaattcgaaaaaataaataaagttaaggtaatatatagttattttgacgcaaacttttacaaaaaaggtgcatataatctttgtgtaaaatacattaaggagatataaaatgaatattacaacaatattaaacacaaaaaaattaattaattatattttagataatagagattgttttatgaataaaataacaaaatttgaatcactaagtggaaaatgtgttgtttttgttagatacggtgaaatttctattgaatactatgatagtgatacaaaatacaatgatttatttactttagacattgacgttgatgttcgtacatatagttttagttgtcttgaggttttttatcgagaacatttaaacccattatataaaaaagaagtttttatggattgtactattgatgacgtattagaatatttcgagaaaccaatagaaagtaatataacaataatttttcaaaacaaagtgatatataataacgggaacgtgatagaacatgactaatatattaaacatagctattattttccttttagcatttttaattacacttgtaatacttatgacaatgcatatacgtgtgtcatttggtgttttatttactacattgattatattctacattatctttttagtggttatatatgggttatatggaggtcgttagcaatggttagacatacgtccgaaatggataaatggaaaaaagaaagagacgcaagaaaagagcaggaaaaagaattgtttttaaatgattttagtactgttaattttaaatttgatgataaagatttacaagaggcgtacatagacacatggaaacatttcgcacatttgccctattttccaaaagaaagaaacgtgtcatatgcaaatgccgtatcattggtaagaggtaaaagacatgaacaattaaactatatacttgaaatatataaccgtaaagatgaatctaataataaaaacgctaaaaaacataaatatgctttatatgaattacaagctaaaaataataattcttctatgtataaatatattaaagaaattgacactttatacaaagaaattggtaaatcagacagaccagtgactactattgatgataaagatgtgaggtataactttttatattatgcaacatttgaagagtaattttaatactgtaaacgacatcataaactattataaggagcaaaaacatggtgaaacaaaatcgtttagacatggtaagagattatcaaaatgctgtcaatcatgtcagaaaaaaaataccagataactataatcaaatagaattagttgatgaactcatgaatgatgatatagactattacatatctatttcaaaccgttctgacggaaaatcgttcaactatgtttcattctttatttatttagctataaaacttgatattaaatttactttattatcacgtcattatacattacgtgacgcttatcgtgattttattgaggaaatcatagacaaaaacccactattcaaatctaagcgtgtcacattcagaagcgctagggactatttagctatcatctatcaagataaggaaatcggtgtgattacagatttgaatagtgcaactgatttaaaatatcattctaactttttaaaacactaccctatcattatatatgatgaatttttagcacttgaagatgactatttaattgacgagtgggataagttaaaaacaatttatgaatcaatcgaccgtaaccatggtaatgttgattatattggctttcctaaaatgtttttactaggtaatgcagtcaacttttcaagtcctatattatccaatttaaatatatataacttattacaaaaacataaaatgaacacatcacgactttacaaaaacatttttttagaaatgcgaagaaacgattacgtaaatgaaaagcgtaacacacgggcattcaattcaaacgatgacgctatgactactggcgagtttgaatttaacgaatataatttggcagatgataatttaagaaatcatatcaatcaaaacggtgattttttctatattaaaactgacgataaatatataaaaattatgtataatgttgatacatttaatgctaatattattgttataccttatacaaaacaatatgaattttgtactaaaatcaaagatatagatgacaatgttatttatttaagagaagatatgttttataaagaaaacatggagcgttattattacaatccaagcaatttacattttgataacgcttactcaaaaaattacgttgttgataatgatagatatttatatttagatatgaataaaattataaaatttcatataaaaaatgaaatgaagaaaaatatgagtgaatttgaaagaaaagaaaaaatatatgaagataactatattgaaaatacaaagaagtatttaatgaaacaatacggcttataaaaggtgtgtaagattatgggattactagaatgcatgcaatatcataaacatgaacgtcgaatgattttatactgggatatagaaacattagcgtacaataaagttaacggacgaaaaaaaccaaccaaatataaaaacgtaacgtattcagtagcaattggttggtttaatggttatgagattgatgtagaagtatttcctagttttgaatcgttttatgacgcattttatacgtatgtgaaacgacgtgatacaatcactaagtcaaaaacagatattatcatgattgcacataactgtaataagtatgacaaccattttttacttaaagataccatgcgttattttgataatatcacacgtgaaaatatatatttaaaatctgcagaagaaaacgaacacacactaaagatgcaagaggctactattttagctaaaaatcaaaatgtgattttagaaaaacgtgtgaaatcgtctattaatttagacttaacaatgtttttaaatggatttaaatttaatattattgataactttatgaaaacaaatacatcaattgcaacattaggtaaaaagttgcttgacggtggttatttaacagacgaccaacttaaaacagattttaattacacgatatttgataaagataacgacatgtcagatagtgaagcctatgactatgccgtaaagtgttttgctaaactcacacctgaacaacttacatacattcataatgacgttattatattaggtatgtgccatattcattatagtgatatatttccaaattttgactataacaaattaacattttcattgaatattatggaatcgtatttaaataatcaaatgacgcgttttcagttactcaatcaatatcaagatattaaaatatcatatacacattatcatttccatgatatgaatttttatgattatatcaaatcattttatcgtggtggtttaaatatgtataacactaaatacataaacaaacttattgatgagccttgtttttctattgatatcaattccagttatccttatgtgatgtatcatgagaaaattccgacatggttatacttttatgaacattattcagaacctacattaatccctacttttttagatgatgacaattatttttcattatataagattgataaagatgtatttaacaatgatttattaattaaaatcaaatcacgtgtattacgtcaaatgattgtaaaatactataataatgataatgattacgttaatattaatacaaatacattaagaatgattcaagacattacgggtattgattgcacgcatatacgtgttaattcgtttgtgatatatgaatgtgaatactttcatgcacgtgatattatatttcaaaactattttattaaaacacaaggtaagttaaaaaacaaaatcaacatgacatcaccttacgactatcatattactgatgacatcaacgaacacccttactcaaatgaggaggttatgttgtctaaagttgtacttaacggattatatggcatacctgcattacgttcacattttaacttattccgtttagatgataacaacgaactatataatatcattaacggttacaaaaacactgaacgtaatatattattctctacatttgtcacatcacgttcattatataacttattggtacctttccaatacttaactgaaaatgaaattgacgacaattttatttattgcgatactgatagtttgtatatgaaatccgttgttaaacccttattgaaccccagtttattcgacccgatagccttaggtaaatgggatattgaaaacgaacagatagataagatgtttgtactgaatcataaaaaatatgcatatgaagtgaatggaaagattaaaattgcttctgctggtataccgaaaagcgcctttgatacaagcgtcgattttgaaacctttgtacgtgaacaattctttgacggtgtgataatagaaaacaataaaagtatctataacgaacagggtacgatatcgatttatccgtctaaaacagaaattgtatgcggtaatgtatatgatgaatattttactgatgaacttaatatgaaacgtgaatttatcttaaaagacgctagagaaaattttgaccatagtcaatttgatgatattctttatattgaaagtgacatcggttcattctcacttaatgacttatttccagttgtacgttcagtgcataataaatctaatttgcatatattaaaacgtgaacacgatgaattaaaaaaaggcaactgttaaataacagtcgcctttttcttttgatataacatgaaaaatgtgtacgaaaattgattatgttttgtattttatttactagcattactagcatgttttcattatagcatagttaattaagcaataccactgaagaatacaatattatcaccagcgttatgaggtacaccattaatcaatgtatataatacaacccgtgacggtgccacgtatggtgggacgttatagtttgctactaagaatgaaccatcgtcaaatactgctacaacgacacctgtgtgaccaatgccatatgctgttgcttgtaagtatggtggtttacttgaaaaaccataccctactgttggattatgtgttgtttttgcacctaactttttatatacgtaccacacacgttgaccgtttgttatttgaccgtcgtctgttggttgtcttttaccatgtaattgtgacatatatgcccatgttaattctgtacattgtcctgcattacccgtttgaggaaatatgttacctggtttgtacaagtattcttttttgaataaaggtacaccaattgcttttttatatttttctggtaactgtgcatacgtccagttaccaccaatgacgcgtccacttttaccatttggtttgactgacttaccactaattggtttatggtccccgtcatcatcagtagggtttgaactactatccccactatctacttgcacactatcaatcagtttttttaatgaatcaagtagcccaatcgtcattttaatatgatatgtgttgttaaatgttttttgtaatgtaaaataatcattactaaaaaatttatcactaccaatactgtgtacatcccattgtaatgcgtcttgtactttttttaataattcttgcatggcttgttttgctaaagcgagcagtgaactaccactgtcaccactactaccactgtcagacgaatcactaggtgaaccacctttaccgtctaatttaccaccccatgctaaaatagtatttgcaccgtctaaaaaaggattaccatagttttgtactttattatatgacgctttcaaacctaggggataatatgccgcccaagtagccgctgctgttaatggaatatacgcacgtccgattgtacctgctttcatatttttagcaaaatctgcattaccttttctttgtacgtcttgaggtacaaagtgaacgatgttacctgcgtcataccaagacggttgtcctgcttgttttgattgtgatactaattttcttgcaatgaatttagcgtctgttaaatagtcacctcgtgcagatgtatggttcaaccaacctaaaccagcgctatacccttcatttttttcatatacagcaaaaagagtaggtgacacacctatctcttttactgcttttaatacttgtctgattttactttcattaccacctagccatacattaaagcgtccatacccttttactttagggactaactggtctatcgttaaaccgaaatcatcattaatatacgaatgcgtaaatttatctatcttctcttggtcgttcattattatcacccttttcagaatcgtttttaattactcttaatttatctttaatttgttcaggcactaatacgtccatttcagcacaattttcaacaatagatagtccctcatttgcgatataatagaaaatcgtaatcatgagtaaaccaccttttaattgtaaaatctggtcaatgatgttagctaaaatgataatacagaatatcaataattttttagcaaaacctttcattgattttttagaccatagattattatttttaattgctttagcaaaaccagtaacaacatctataatcatcaaaacaaataaaaaatatagtaactttaaatcacctgcatatatgaacatatgaaatgcttctgtgtccgtaaatcttaattttacctcattcattttatacaccttctctaaatttattatttaacgggttctgtaacattggattacctgaaccgtcattatgccaaaatctcacaccagattctaaaattgcttttaattgttccattaacatagggtcaatgtcacgtatggtatacgtacctgtacattttaaatagttgcatacagtcatgctgttaataggttcaatgaatgtattatagtcatttacttcaaaaccaaacaacatataatatttttgtaaaaatgtaatttctttaggtgacggtacactaattttcatcgttaaaccgttaatgctatttgcaatttggaatgcgtttcccatttctgattctgtcacagatggtggttgtaaggctaaatctttatattctgcctgttgttgtttgtagaaattatattcttcattaaacttaccaaataaagcggttggacttaaattacttgctacacttacagcgtcataaaaacgtgattttgggtcactaccatttaatacattatctatacgacttgtgattaattgactttctgcattacgctgtctattggcttgttgtgattgtcctaaaattccgttattaattaatataggcacttgcgcaaaactattaaatgttatattggtatttaagaatgaacctgtatcaattaatatatctttatttttagcaagtatcggtctatcgttttcagcactgttataatcaactggatatactcgcacttcattatgataaccaatgatggattttgtacgtaacttaacacctgttttttgtgaaattttaccagcgtcaagtaacattgtgttaccgttccagtcataaaattcaatcgtcatgtactcattacgtatcatatgtttaaactcgtcttttttagacaacatcatctcttgaagctttgtgaaacttaatgataaatcgtttaaactccattcttttgattttccaccctgttttaatgtctttaatccagtaattttttcacttgtcttaacgtcctctaaatcttttgtattaataaaatctttaggtaacatttgaaccttttgaaagttttgtgtaatccatggatatgcactcattttatccataaagttaataaagtcaccatattccataacgtataagttgactggcgatgtgatattgtcatatatcgtacctttagacgtatctaagtttggctcttttttcgtaccaaatttctttgataaatcagcgcttgactggaataacactaaattttccaaatactgttgcatttggttatacacatagtttttatttgatacttttaacacatcatcattgttacgtaacatcggcaacatatagttatacgtacgctttgataagtgttgacgttcaatattaacgtttgaaagttgttctaatacattaccttgtgtatacgtcataatagtatcaatcacaaaatatatttttaccacaacatcattcacatattcgatttgattcacaaaagcgtaatagcgtctatcctcaaaatctgataaaaacgtcatgtagttaatcccttgtgcgtcatgccactgcatatcaacattgatttccattctatcacgtataaaattatacggttgtttggaatagtctaatgatttaaaatgacgaccgtttaaaaaataatcatcacgctctttattactattaaaatgaattgtattttgatagtctgtaaacggtgtgttatagaaaaatttaaaatttgttaattttctcatttttacctccataaaaaatagtcgtataaataatttatacgactattataacatttttattcaatgatttgtgtatctattgcaaaacgtttatctccatttgttaagtcactatcgctataatttgatgtaacaaaatgtaattcattattaaagtttaaatataatcttgtattcatcattttattatcaatcgcacattgtgtgtagtgatgtgttgattttaagtttgcgttaatcgtacctaatttaatatcaccgtttttcttaatcccttttaataccccttttaattgtatggttttaacaccattaattgttacaatacgatattgcggtgcgggataacccccgttgctatcacttgcaacaataccactttcaagttgcacatcttgccaacctgtatcattaaattgtaattttgcactgttaattttttgatcaaaattttgttcaatttctgatttagattgtgcaattttagtatctatatttaagttatccacttttgttgataaaacgcttatacttgattcgtttgttgatgttttttgttttaaatcactaatatcattatcatattttgataaatcaatatgaccgtttccgtcaacaactggtctgtcttttaattcttgaataactttttcaatttttgatattttatcattatttgtttttaaagtagcgatgtcagatttaattgaattaatatcctgtgtataatctttttggttaatactgtttaattttgtttctaactcttttatcttatcaaggttggtatttgctttgatgtcattaatggtttgttctaaactttcaagtttcccagaacttgaattttgttttaacttattaatatcctcttgtatttcttgaattgtgttgtcattgttttgtttagattttaataattcaatttgactttctatgtcttttattttatcaagattaacactttttttaacttcagctaattctctttttaatgcgtcaatgttttctgcaccagtatttgatttaattatattaatttcatttgtgtttcgtcctacactatctttagtagcgtttaaagattgtgtaagtgtttcatatttatcatcatactttaacattgatttttcaaattcatttaattgtgtttgatgttgttctaaactttcatttaatatgacatttttttcttttaatgaatcaatgtcttttttattactatcaatcattggttggaatttttttattttctctagaaatgttgatattttttctttgttatcattaattgcaatatcatgatgttctatttgaccactgtatttattaatcaatgtttttaaatcattataaaatgttaatttataataaccagtatcagtacggacataaatatgtccgtctgatgtactgattaagtcattttcttctgttaaaaaatctgctaacctgtctattgtttcaacttgtcttaaacttcttacgattctatcagccattgttcacacctcttatttgtatcgtttccaactaaactcaaagaaaaaacctaaaatacccattatgagaaaaccccccaaggaataccaacactataactattacccgttttaccgttccattttcttactggtaaataataacgtgtaccttgccagttgtaaccaatccatacatacccatctgataaacaaacttcgtcatatggtgtataaccatttggttggaaccaatatccattaggttcacttaatttaggactacctacacgtgcaaatattggtaaaaatccacatgtaaatgttgcattttcatttctgtaatatgtgccatattggttttgtttccattttccgaatgtgtttacttttgatgtttctaattcgttgctgttactagcagaaaatttaggtctaataaagtgtgttacaccgtcataataatgtgttcttattgttgctttttcccaaccgtcaaacccaccacctaaccagttttgctctaaacatgtataataatctaaattaccacttaacacacattgaatatgtccatattgtccatctgtatatacaccaacatcccctaattgtggtttaaagttcggtgtattttcatacaccattgctaaacctttaaagtcattattgattgcgtctttagcgttaccccacatacgaactttaccgtctgtaatgtaatatatataagcaacagctaagtcagcgcattgataaccaaatgctaaatcaaagtccacacctacaccctcatgcttatatatccattcttttgcttgttgttgtgatttcatgaaacattatcctttcttaacccaactatattgacgtttttttgtatctgcattaacgttactaaagaattctttatgttcggacacattagcctctaatgtttgtcttacttcaccgacagcgttaccacttgaaacacgtaaccatgcacccacttttttaatttcttctggtgcgtctctaaacaattccatttggttaccagtaatataatattcaccaggtgtcgtaacgtaagctatccagttattgtattgacttgcttctaaatactcttgatatggtgcgtctgttttgattgttgtccataaaccataatcccattttaatgtaaatacatcgagcgtcataccacgcatgattttaaccatttttcgaccagtagaaaaacgcgttaattcttgtactgtacctaatgtttgtgttgtagggtatacattgatgaaacaaccagcgtctataatttttttactaccattcattggcatatttttaagtttactagctgtaccaccgtcaatataatagaaccctgcttgtgttaagtcatttaagtcgtcaatatggtctggaattgataacgcacgtccatcgtcttttgttaatttatagttttgtgaacctctcgcacgtaatgcttcaaagtgttcatactcaccaagttgaaagaacccatataaattattgaatcgttttccaccaccgccattagtcatagcaagtaataacgatttacgttttgtttttggattggtataaatacaaataccctccggctctttaaagttatcacgtggaaaattaataccgtcttgatatgataatttaaacggataatcataaatcttttgaccagttgttaatgaatatttaccaatttgaacgtgtgaattaactgaactgttaccacttaaccagtataaatcatcaccatcaacggcaatcccttgcatccatcgattatcattgttttctgaattatcaatcgtcatttctttttctacattatcaatgtgattttttacgtcagctcttgaacgtacctgtattgtcccgtcaccgaatcttaaaacgattttgtcattttcttcatcaattaacggtgtaaacgtgtgtttgtttaaaagtgactgtggtgtataatctgttaaccctttagcctcttctaaatctaaaatataattatctttatatgcgacttgtaacagttttgctacaccgtcatgatgtaaccatattttcatttcaccgttagattgtctttctaaacctattgtagtaccgtgaccaccttgtacaatacgcatactagaaattaagtcaccgctaggcgttaatttattaatccaaaaaccttctgggttttgtgaatctgattgtgtagagtacatttgattcgtttctttatctatgtttatagattggttaacagcattacgaataccaccgaatcccataacaaactttggttcaagctcatttaattcaaaaccattaacaaaacggtcaatgtctttaattaagtctttaacttctgatttaaaatcattcatttgtttcatttctgcaactttaaataatgcaaatgcagatgtaagaccagtactatatttagtaaattcatcatgaataattttatctattgtaccgtcgtttaaccaacctctaaataagtctttcgcttggtctgggaatgctttcattaagtcgtcccaatttttgaaacgtttttttaattcattgtcatagtcccaaatacgacgtgctaatacttcaattagttttgataatcttgaaatataatcataatatgattttgaattggtattataatctgctctatcatcgtaaaacggtgtgtaacgttctctcgttttatatatttcgtctaaaaatggacgaatgtcgtcaaaatatttaaaatcgttttcattatatgccataattttccacctttaccaaatttgtaaaaaacattttttatcaaattcatttaaaattttctttcttaaatcgtatactttatcaatattatcaattaaatactgttttgaaaattgtgtacctttcgcattacctttttgattttgattacgttttgcgttttgattactttcgttacttgatttattcacagttttaccgttgtcaattgtattattatctgcaaatcgtaacgttgtgttatctacatcaatgttaacctcgctttgtggtaatgacgcataagcatttctgttcgctgtcatgccagttgaattgtctaaagatgttgcattttgatttgaggtttcatctgtattgtttgttgtatcttcattatgttctgtaaaaccttgtgattgtagatatttttcaacttcgcttgatgaataaaccacattcaaataatcctcatgtgtgatacatacagtaatcacttgcatgccaaaagcttcaactgtttgtctgttgatttctctatctaaaaagtgtattgtaaatgattttttaaaaagtaagtcagataagtcatctttaagtttaaaacctttaaacactttttcattaacgatggctaaaacgtctttgtcaaacttcaacattttttgcatgaattgaaattcatcatcataaaacgttaatttatcattatttacaaattcattaaaaccttttttaattaattctgatttaataaaatcaaataaagtcattgtatatctagccattgtattcactactttcatcattagacaatgtatctatcattgtgatttctgaagtaacttcatcgtcgtaatacggtttaatatctaaaccataacgttttgataagaatgtaatcggttcacgaccttttaaataaatattactatttgatgtggtaaaacctcggttgctttttgcctcttcgtccgaaacaccgctttccttatccactgctagtgagttaatacctaaatagttacttaattcactaattttattttggtattcgcgtttcatctcagttagtgctggaatcacactattactggttaaatctatgatatcatcatcggcgttaaacataggtgacattttaacaaatggtgcaccgttgtatatttccgatacaagttgattaactgactcatcattaatgtctgatttaaatattttgctaaattttgcttgcataattaatgagaatctagataaaacaacctcagataattcatcagtataatgttctataatttctatatcactattatattgaattggtttattttgcatgacaacaaagttaccactcatacagttatcatatattttatgaatctgtaagcattcatctggtattaaatagtctggaacaatgaaataaatatcatcttttgttaatcgtttttgaaattgaaagttaaagtttgatgaaaaatttggtgcttgattaaagtaagtattatttacgtaaccaagaatcataatttgttcatttcttgctttgccgaccactacattgatgttttgtcttaatgctgattctaattgaataaaatctataccaaccgtatcacgattggtatagttgatgagtagtggtaaaaattccaaataacgattaaacataagacgtttaaatctgttgcgatgttctacaactcttttgttgatttcttttgataattcaacctgtacacctttattatgtttagtcatttatagcacctctattattctgttcttggtgttacatcttggtcagtaattaaaattttattaaagaatgggctaatggctttaaatgaatagtaatgaatccagtgtgtgacttcatcaaattcaccattatagaatggttgttttaacataccttttgtgtaacgtttatatttaattgaattaatatccaaaataaacgcgtataaatctgattttggtttaatttcttcaacattatctttaaactctgatagttttgacacatcataagtgaatactgaaccaactggaattgtatcacctttatgagtttgataatcaccgtaagcacgtaagaaagctactgattcatcacttgatacgacaatatctttagtgactttgaaaacaccacctaggtcgtcaaaactgataacgtggtctgtaaagtcaatccctgctacttggaatgtgttcgcaatctttgtatctaaaagataagattttaagctatcagtcgttaaaataacaatatcttttaattttgaaactgttgtatattgtccgattgcaccacctgaagcacgatgaacttcattatatttagcgctgttgttttgtaagttaagaatagcttcaaaaactttacttgctaaatcttcttttgatgttgctttacgtacatttgattcagataattgattcaatgagtaatcaactaacattgcacgcatttctttttcttctaatacgttaatatcagaaattttctttttatagacacctaatgcataattagtagcgtctgctaatgtttggaaattgaaacgtgtgtcattgttatttaatgtaaatttttgtttcttcacaataccactaccatataacttagtagccatacgtggatagttacgtttcaacattagttcttcatttttagataagtccatgttaataggtactgtatccataattacatattcttcactgtattgacctataaagtcctgctctttagctaaccaattaaaacggttacctaatgcaatatcgattaataacgtttcattaatcttagggaataaaaatttatttacaaatgtttcaaacattgtattagaattatcccacttatcgccaaacgtccatgattttgaataagtatgattaaagtcttgtaatgcagatttagctgactttgcaactaatagtgctgtttcgttttttgtactcttttctgccatgatttattattcctcctcaacatcgccagtaaatgactgttttgaaagtgaatgaatttgtacaccataactatcttcacttttatttgtatcaattgacatattttcatttaattctgttcgtttatttaatcttgaatcttcatatgatgtacccatcatagaacgcatgttgttaccctcgtacatgtttaagttcctcctaatctaaatctaatttatcgacaagttcttcatctgaatagtctttatcattgttatctgtttcttttgattctggttgtggttgtggttgtggttgtggttgttgcatttgtgatgtttcaaaattagtaaatcgttgttctaatgaagcgatacgttgttctaaaacaactgggtctaattttgcacaatcttcatctgttgtagtaggttctaatttgttttcattttcttcttcgattgtttctactgttttatcttcagttgattcttcagttgattcttcagttgattctgaagtttcttcagttgattctgaagtttcttctttgtcgtctggttttacgatttcatcaaattctgtcattttgacacctccaaatattttataactaattatatcatagaatatttaaataagtaaattaaatttattttattttcaaatcataactttgaataaaagtcaatagatacataaattttgtatttaatgaatatgtaataggttagataagttggaaaagtagacgcacagtttttataagtttagtaaagaaatgatatgttaatttataagttttgatttgtataatcgtttattttaaacggtggggaggtgtaa

SEQ ID NO: 97 - DNA, 18047 bp, Rosenblumvirus sp.
  source 1..18047: mol_type = genomic DNA
gtttaaaataaacgattatacaaatcaaaacttataaattaacatatcatttctttactaaacttataaaaactgtgcgtctacttttccaacttatctaacctattacatattcattaaatacaaaatttatgtatctattgacttttattcaaagttatgatttgaaaataaaataaatttaatttacttatttaaatattctatgatataattagttataaaatatttggaggtgtcaaaatgacagaatttgatgaaatcgtaaaaccagacgacaaagaagaaacttcagaatcaactgaagaaacttcagaatcaactgaagaatcaactgaagaatcaactgaagataaaacagtagaaacaatcgaagaagaaaatgaaaacaaattagaacctactacaacagatgaagattgtgcaaaattagacccagttgttttagaacaacgtatcgcttcattagaacaacgatttactaattttgaaacatcacaaatgcaacaaccacaaccacaaccacaaccacaaccagaatcaaaagaaacagataacaatgataaagactattcagatgaagaacttgtcgataaattagatttagattaggaggaacttaaacatgtacgagggtaacaacatgcgttctatgatgggtacatcatatgaagattcaagattaaataaacgaacagaattaaatgaaaatatgtcaattgatacaaataaaagtgaagatagttatggtgtacaaattcattcactttcaaaacagtcatttactggcgatgttgaggaggaataataaatcatggcagaaaagagtacaaaaaacgaaacagcactattagttgcaaagtcagctaaatctgcattacaagactttaatcatacttattcaaaatcatggacgtttggcgataagtgggataattctaatacaatgtttgaaacatttgtaaataaatttttattccctaagattaatgaaacgttattaatcgatattgcattaggtaaccgttttaattggttagctaaagagcaggactttataggtcaatacagtgaagaatatgtaattatggatacagtacctattaacatggacttatctaaaaatgaagaactaatgttgaaacgtaactatccacgtatggctactaagttatatggtagtggtattgtgaagaaacaaaaatttacattaaataacaatgacacacgtttcaatttccaaacattagcagacgctactaattatgcattaggtgtctataaaaagaaaatttctgatattaacgtattagaagaaaaagaaatgcgtgcaatgttagttgattactcattgaatcaattatctgaatcaaatgtacgtaaagcaacatcaaaagaagatttagcaagtaaagtttttgaagctattcttaacttacaaaacaacagcgctaaatataatgaagttcatcgtgcttcaggtggtgcaatcggacaatatacaacagtttcaaaattaaaagatattgttattttaacgactgatagcttaaaatcttatcttttagatacaaagattgcgaacacattccaagtagcagggattgactttacagaccacgttatcagttttgacgacctaggtggtgttttcaaagtcactaaagatattgtcgtatcaagtgatgaatcagtagctttcttacgtgcttacggtgattatcaaactcataaaggtgatacaattccagttggttcagtattcacttatgatgtgtcaaaactatcagagtttaaagataatgttgaagaaattaaaccaaaatcagatttatacgcgtttattttggatattaattcaattaaatataaacgttacacaaaaggtatgttaaaacaaccattctataatggtgaatttgatgaagtcacacactggattcattactattcatttaaagccattagcccattctttaataaaattttaattactgaccaagatgtaacaccaagaacagaataatagaggtgctataaatgactaaacataataaaggtgtacaggttgaattatcaaaagaaatcaacaaaagagttgtagaacatcgcaacagatttaaacgtcttatgtttaatcgttatttggaatttttaccactactcatcaactataccaatcgtgatacggttggtatagattttattcaattagaatcagcattaagacaaaacatcaatgtagtggtcggcaaagcaagaaatgaacaaattatgattcttggttacgtaaataatacttactttaatcaagcaccaaatttttcatcaaactttaactttcaatttcaaaaacgattaacaaaagatgatatttatttcattgttccagactatttaataccagatgaatgcttacagattcataaaatatatgataactgtatgagtggtaactttgttgtcatgcaaaataaaccaattcaatataatagtgatatagaaattatagaacattatactgatgaattatctgaggttgttttatctagattctcattaattatgcaagcaaaatttagcaaaatatttaaatcagacattaatgatgagtcagttaatcaacttgtatcggaaatatacaacggtgcaccatttgttaaaatgtcacctatgtttaacgccgatgatgatatcatagatttaaccagtaatagtgtgattccagcactaactgagatgaaacgcgaataccaaaataaaattagtgaattaagtaactatttaggtattaactcactagcagtggataaggaaagcggtgtttcggacgaagaggcaaaaagcaaccgaggttttaccacatcaaatagtaatatttatttaaaaggtcgtgaaccgattacattcttatcaaaacgttatggtttagatattaaaccgtattacgacgatgaagttacttcagaaatcacaatgatagatacattgtctaatgatgaaagtagtgaatacaatggctagatatacaatgactttatttgattttattaaatcagaattaattaaaaaaggttttaatgaatttgtaaataatgataaattaacgttttatgatgatgaatttcaattcatgcaaaaaatgttgaagtttgacaaagacgttttagccatcgttaatgaaaaagtgtttaaaggttttaaacttaaagatgacttatctgacttactttttaaaaaatcatttacaatacactttttagatagagaaatcaacagacaaacagttgaagcttttggcatgcaagtgattactgtatgtatcacacatgaggattatttgaatgtggtttattcatcaagcgaagttgaaaaatatctacaatcacaaggttttacagaacataatgaagatacaacaaacaatacagatgaaacctcaaatcaaaatgcaacatctttagacaattcaactggcatgacagcgaacagaaatgcttatgcgtcattaccacaaagcgaggttaacattgatgtagataacacaacgttacgatttgcagataataatacaattgacaacggtaaaactgtgaataaatcaagtaacgaaagtaatcaaaacgcaaaacgtaatcaaaatcaaaaaggtaatgcgaaaggtacacaattttcaaaacagtatttaattgataatattgataaagtatacgatttaagaaagaaaattttaaatgaatttgataaaaaatgttttttacaaatttggtaaaggtggaaaattatggcatataatgaaaacgattttaaatattttgacgacattcgtccatttttagacgaaatatataaaacgagagaacgttacacaccgttttacgatgatagagcagattataataccaattcaaaatcatattatgattatatttcaagattatcaaaactaattgaagtattagcacgtcgtatttgggactatgacaatgaattaaaaaaacgtttcaaaaattgggacgacttaatgaaagcattcccagaccaagcgaaagacttatttagaggttggttaaacgacggtacaatagataaaattattcatgatgaatttactaaatatagtactggtcttacatctgcatttgcattatttaaagttgcagaaatgaaacaaatgaatgattttaaatcagaagttaaagacttaattaaagacattgaccgttttgttaatggttttgaattaaatgagcttgaaccaaagtttgttatgggattcggtggtattcgtaatgctgttaaccaatctataaacatagataaagaaacgaatcaaatgtactctacacaatcagattcacaaaacccagaaggtttttggattaataaattaacgcctagcggtgacttaatttctagtatgcgtattgtacaaggtggtcacggtactacaataggtttagaaagacaatctaacggtgaaatgaaaatatggttacatcatgacggtgtagcaaaactgttacaagtcgcatataaagataattatattttagatttagaagaggctaaagggttaacagattatacaccacagtcacttttaaacaaacacacgtttacaccgttaattgatgaagaaaatgacaaaatcgttttaagattcggtgacgggacaatacaggtacgttcaagagctgacgtaaaaaatcacattgataatgtagaaaaagaaatgacgattgataattcagaaaacaatgataatcgatggatgcaagggattgccgttgatggtgatgatttatactggttaagtggtaacagttcagttaattcacacgttcaaattggtaaatattcattaacaactggtcaaaagatttatgattatccgtttaaattatcatatcaagacggtattaattttccacgtgataactttaaagagccggagggtatttgtatttataccaatccaaaaacaaaacgtaaatcgttattacttgctatgactaatggcggtggtggaaaacgattcaataatttatatgggttctttcaacttggtgagtatgaacactttgaagcattacgtgcgagaggttcacaaaactataaattaacaaaagacgatggacgtgcgttatcaattccagaccatattgacgacttaaatgacttaacacaagcagggttctattatattgacggtggtacagctagtaaacttaaaaatatgccaatgaatggtagtaaaaaaattatagacgctggttgtttcatcaatgtataccctacaacacaaacattaggtacagtacaagaattaacgcgtttttctactggtcgaaaaatggttaaaatcatgcgtggtatgacgctcgatgtatttacattaaaatgggattatggtttatggacaacaatcaaaacagacgcaccatatcaagagtatttagaagcaagtcaatacaataactggatagcttacgttacgacacctggtgaatattatattactggtaaccaaatggaattgtttagagacgcaccagaagaaattaaaaaagtgggtgcatggttacgtgtttcaagtggtaacgctgtcggtgaagtaagacaaacattagaggctaatgtgtccgaacataaagaattctttagtaacgttaatgcagatacaaaaaaacgtcaatatagttgggttaagaaaggataatgtttcatgaaatcacaacaacaagcaaaagaatggatatataagcatgagggtgtaggtgtggactttgatttagcatttggttatcaatgcgctgacttagctgttgcttatatatattacattacagacggtaaagttcgtatgtggggtaacgctaaagacgcaatcaataatgactttaaaggtttagcaatggtgtatgaaaatacaccgaactttaaaccacaattaggggatgttggtgtatatacagatggacaatatggacatattcaatgtgtgttaagtggtaatttagattattatacatgtttagagcaaaactggttaggtggtgggtttgacggttgggaaaaagcaacaataagaacacattattatgacggtgtaacacactttattagacctaaattttctgctagtaacagcaacgaattagaaacatcaaaagtaaacacattcggaaaatggaaacaaaaccaatatggcacatattacagaaatgaaaatgcaacatttacatgtggatttttaccaatatttgcacgtgtaggtagtcctaaattaagtgaacctaatggatattggttccaaccaaatggttatacaccatatgacgaagtttgtttatcagatgggtatgtatggattggttacaactggcaaggtacacgttattatttaccagtaagaaaatggaacggtaaaacgggtaatagttatagtgttggtattccttggggggttttctcataatgggtattttaggttttttctttgagtttagttggaaacgatacaaataagaggtgtgaacaatggctgatagaatcgtaagaagtttaagacaagttgaaacaatagacaggttagcagattttttaacagaagaaaatgacttaatcagtacatcagacggacatatttatgtccgtactgatactggttattataaattaacattttataatgatttaaaaacattgattaataaatacagtggtcaaatagaacatcatgatattgcaattaatgataacaaagaaaaaatatcaacatttctagagaaaataaaaaaattccaaccaatgattgatagtaataaaaaagacattgattcattaaaagaaaaaaatgtcatattaaatgaaagtttagaacaacatcaaacacaattaaatgaatttgaaaaatcaatgttaaagtatgatgataaatatgaaacacttacacaatctttaaacgctactaaagatagtgtaggacgaaacacaaatgaaattaatataattaaatcaaatactggtgcagaaaacattgacgcattaaaaagagaattagctgaagttaaaaaaagtgttaatcttgataaaataaaagacatagaaagtcaaattgaattattaaaatctaaacaaaacaatgacaacacaattcaagaaatacaagaggatattaataagttaaaacaaaattcaagttctgggaaacttgaaagtttagaacaaaccattaatgacatcaaagcaaataccaaccttgataagataaaagagttagaaacaaaattaaacagtattaaccaaaaagattatacacaggatattaattcaattaaatctgacatcgctactttaaaaacaaataatgataaaatatcaaaaattgaaaaagttattcaagaattaaaagacagaccagttgttgacggaaacggtcatattgatttatcaaaatatgataatgatattagtgatttaaaacaaaaaacatcaacaaacgaatcaagtataagcgttttatcaacaaaagtggataacttaaatatagatactaaaattgcacaatctaaatcagaaattgaacaaaattttgatcaaaaaattaacagtgcaaaattacaatttaatgatacaggttggcaagatgtgcaacttgaaagtggtattgttgcaagtgatagcaacgggggttatcccgcaccgcaatatcgtattgtaacaattaatggtgttaaaaccatacaattaaaaggggtattaaaagggattaagaaaaacggtgatattaaattaggtacgattaacgcaaacttaaaatcaacacatcactacacacaatgtgcgattgataataaaatgatgaatacaagattatatttaaactttaataatgaattacattttgttacatcaaattatagcgatagtgacttaacaaatggagataaacgttttgcaatagatacacaaatcattgaataaaaatgttataatagtcgtataaattatttatacgactattttttatggaggtaaaaatgagaaaattaacaaattttaaatttttctataacacaccgtttacagactatcaaaatacaattcattttaatagtaataaagagcgtgatgattattttttaaacggtcgtcattttaaatcattagactattccaaacaaccgtataattttatacgtgatagaatggaaatcaatgttgatatgcagtggcatgacgcacaagggattaactacatgacgtttttatcagattttgaggatagacgctattacgcttttgtgaatcaaatcgaatatgtgaatgatgttgtggtaaaaatatattttgtgattgatactattatgacgtatacacaaggtaatgtattagaacaactttcaaacgttaatattgaacgtcaacacttatcaaagcgtacgtataactatatgttgccgatgttacgtaacaatgatgatgtgttaaaagtatcaaataaaaactatgtgtataaccaaatgcaacagtatttggaaaatttagtgttattccagtcaagcgctgatttatcaaagaaatttggtacgaaaaaagagccaaacttagatacgtctaaaggtacgatatatgacaatatcacatcgccagtcaacttatacgttatggaatatggtgactttattaactttatggataaaatgagtgcatatccatggattacacaaaactttcaaaaggttcaaatgttacctaaagattttattaatacaaaagatttagaggacgttaagacaagtgaaaaaattactggattaaagacattaaaacagggtggaaaatcaaaagaatggagtttaaacgatttatcattaagtttcacaaagcttcaagagatgatgttgtctaaaaaagacgagtttaaacatatgatacgtaatgagtacatgacgattgaattttatgactggaacggtaacacaatgttacttgacgctggtaaaatttcacaaaaaacaggtgttaagttacgtacaaaatccatcattggttatcataatgaagtgcgagtatatccagttgattataacagtgctgaaaacgatagaccgatacttgctaaaaataaagatatattaattgatacaggttcattcttaaataccaatataacatttaatagttttgcgcaagtgcctatattaattaataacggaattttaggacaatcacaacaagccaatagacagcgtaatgcagaaagtcaattaatcacaagtcgtatagataatgtattaaatggtagtgacccaaaatcacgtttttatgacgctgtaagtgtagcaagtaatttaagtccaaccgctttatttggtaagtttaatgaagaatataatttctacaaacaacaacaggcagaatataaagatttagccttacaaccaccatctgtgacagaatcagaaatgggaaacgcattccaaattgcaaatagcattaacggtttaacgatgaaaattagtgtaccgtcacctaaagaaattacatttttacaaaaatattatatgttgtttggttttgaagtaaatgactataatacattcattgaacctattaacagcatgactgtatgcaactatttaaaatgtacaggtacgtataccatacgtgacattgaccctatgttaatggaacaattaaaagcaattttagaatctggtgtgagattttggcataatgacggttcaggtaatccaatgttacagaacccgttaaataataaatttagagaaggtgtataaaatgaatgaggtaaaattaagatttacggacacagaagcatttcatatgttcatatatgcaggtgatttaaagttactatattttttatttgttttgatgattatagatgttgttactggttttgctaaagcaattaaaaataataatctatggtctaaaaaatcaatgaaaggttttgctaaaaaattattgatattctgtattatcattttagctaacatcattgaccagattttacaattaaaaggtggtttactcatgattacgattttctattatatcgcaaatgagggactatctattgttgaaaattgtgctgaaatggacgtattagtgcctgaacaaattaaagataaattaagagtaattaaaaacgattctgaaaagggtgataataatgaacgaccaagagaagatagataaatttacgcattcgtatattaatgatgatttcggtttaacgatagaccagttagtccctaaagtaaaagggtatggacgctttaatgtatggctaggtggtaatgaaagtaaaatcagacaagtattaaaagcagtaaaagagataggtgtgtcacctactctttttgctgtatatgaaaaaaatgaagggtatagcgctggtttaggttggttgaaccatacatctgcacgaggtgactatttaacagacgctaaattcattgcaagaaaattagtatcacaatcaaaacaagcaggacaaccgtcttggtatgacgcaggtaacatcgttcactttgtacctcaagacgtacaaagaaaaggtaatgcagattttgctaaaaatatgaaagcaggtacaatcggacgtgcgtatattccattaacagcagcggctacttgggcggcatattatcccctaggtttgaaagcgtcatataataaagtacaaaactatggtaatccttttttagacggtgcaaatactattttagcatggggtggtaaattagacggtaaaggtggttcacctagtgattcgtctgacagtggtagtagtggtgacagtggtagttcactgctcgctttagcaaaacaagccatgcaagaattattaaaaaaagtacaagacgcattacaatgggatgtacacagtattggtagtgataaattttttagtaatgattattttacattacaaaaaacatttaacaacacatatcatattaaaatgacgattgggctacttgattcattaaaaaaactgattgatagtgtgcaagtagatagtggggatagtagttcaaaccctactgatgatgacggggaccataaaccaattagtggtaagtcagtcaaaccaaatggtaaaagtggacgcgtcattggtggtaactggacgtatgcacagttaccagaaaaatataaaaaagcaattggtgtacctttattcaaaaaagaatacttgtacaaaccaggtaacatatttcctcaaacgggtaatgcaggacaatgtacagaattaacatgggcatatatgtcacaattacatggtaaaagacaaccaacagacgacggtcaaataacaaacggtcaacgtgtgtggtacgtatataaaaagttaggtgcaaaaacaacacataatccaacagtagggtatggtttttcaagtaaaccaccatacttacaagcaacagcatatggcattggtcacacaggtgtcgttgtagcagtatttgacgatggttcattcttagtagcaaactataacgtcccaccatacgtggcaccgtcacgggttgtattatatacattgattaatggtgtacctcataacgctggtgataatattgtattcttcagtggtattgcttaattaactatgctataatgaaaacatgctagtaatgctagtaaataaaatacaaaacataatcaattttcgtacacatttttcatgttatatcaaaagaaaaaggcgactgttatttaacagttgcctttttttaattcatcgtgttcacgttttaatatatgcaaattagatttattatgcactgaacgtacaactggaaataagtcattaagtgagaatgaaccgatgtcactttcaatataaagaatatcatcaaattgactatggtcaaaattttctctagcgtcttttaagataaattcacgtttcatattaagttcatcagtaaaatattcatcatatacattaccgcatacaatttctgttttagacggataaatcgatatcgtaccctgttcgttatagatacttttattgttttctattatcacaccgtcaaagaattgttcacgtacaaaggtttcaaaatcgacgcttgtatcaaaggcgcttttcggtataccagcagaagcaattttaatctttccattcacttcatatgcatattttttatgattcagtacaaacatcttatctatctgttcgttttcaatatcccatttacctaaggctatcgggtcgaataaactggggttcaataagggtttaacaacggatttcatatacaaactatcagtatcgcaataaataaaattgtcgtcaatttcattttcagttaagtattggaaaggtaccaataagttatataatgaacgtgatgtgacaaatgtagagaataatatattacgttcagtgtttttgtaaccgttaatgatattatatagttcgttgttatcatctaaacggaataagttaaaatgtgaacgtaatgcaggtatgccatataatccgttaagtacaactttagacaacataacctcctcatttgagtaagggtgttcgttgatgtcatcagtaatatgatagtcgtaaggtgatgtcatgttgattttgttttttaacttaccttgtgttttaataaaatagttttgaaatataatatcacgtgcatgaaagtattcacattcatatatcacaaacgaattaacacgtatatgcgtgcaatcaatacccgtaatgtcttgaatcattcttaatgtatttgtattaatattaacgtaatcattatcattattatagtattttacaatcatttgacgtaatacacgtgatttgattttaattaataaatcattgttaaatacatctttatcaatcttatataatgaaaaataattgtcatcatctaaaaaagtagggattaatgtaggttctgaataatgttcataaaagtataaccatgtcggaattttctcatgatacatcacataaggataactggaattgatatcaatagaaaaacaaggctcatcaataagtttgtttatgtatttagtgttatacatatttaaaccaccacgataaaatgatttgatataatcataaaaattcatatcatggaaatgataatgtgtatatgatattttaatatcttgatattgattgagtaactgaaaacgcgtcatttgattatttaaatacgattccataatattcaatgaaaatgttaatttgttatagtcaaaatttggaaatatatcactataatgaatatggcacatacctaatataataacgtcattatgaatgtatgtaagttgttcaggtgtgagtttagcaaaacactttacggcatagtcataggcttcactatctgacatgtcgttatctttatcaaatatcgtgtaattaaaatctgttttaagttggtcgtctgttaaataaccaccgtcaagcaactttttacctaatgttgcaattgatgtatttgttttcataaagttatcaataatattaaatttaaatccatttaaaaacattgttaagtctaaattaatagacgatttcacacgtttttctaaaatcacattttgatttttagctaaaatagtagcctcttgcatctttagtgtgtgttcgttttcttctgcagattttaaatatatattttcacgtgtgatattatcaaaataacgcatggtatctttaagtaaaaaatggttgtcatacttattacagttatgtgcaatcatgataatatctgtttttgacttagtgattgtatcacgtcgtttcacatacgtataaaatgcgtcataaaacgattcaaaactaggaaatacttctacatcaatctcataaccattaaaccaaccaattgctactgaatacgttacgtttttatatttggttggtttttttcgtccgttaactttattgtacgctaatgtttctatatcccagtataaaatcattcgacgttcatgtttatgatattgcatgcattctagtaatcccataatcttacacaccttttataagccgtattgtttcattaaatacttctttgtattttcaatatagttatcttcatatattttttcttttctttcaaattcactcatatttttcttcatttcattttttatatgaaattttataattttattcatatctaaatataaatatctatcattatcaacaacgtaattttttgagtaagcgttatcaaaatgtaaattgcttggattgtaataataacgctccatgttttctttataaaacatatcttctcttaaataaataacattgtcatctatatctttgattttagtacaaaattcatattgttttgtataaggtataacaataatattagcattaaatgtatcaacattatacataatttttatatatttatcgtcagttttaatatagaaaaaatcaccgttttgattgatatgatttcttaaattatcatctgccaaattatattcgttaaattcaaactcgccagtagtcatagcgtcatcgtttgaattgaatgcccgtgtgttacgcttttcatttacgtaatcgtttcttcgcatttctaaaaaaatgtttttgtaaagtcgtgatgtgttcattttatgtttttgtaataagttatatatatttaaattggataatataggacttgaaaagttgactgcattacctagtaaaaacattttaggaaagccaatataatcaacattaccatggttacggtcgattgattcataaattgtttttaacttatcccactcgtcaattaaatagtcatcttcaagtgctaaaaattcatcatatataatgatagggtagtgttttaaaaagttagaatgatattttaaatcagttgcactattcaaatctgtaatcacaccgatttccttatcttgatagatgatagctaaatagtccctagcgcttctgaatgtgacacgcttagatttgaatagtgggtttttgtctatgatttcctcaataaaatcacgataagcgtcacgtaatgtataatgacgtgataataaagtaaatttaatatcaagttttatagctaaataaataaagaatgaaacatagttgaacgattttccgtcagaacggtttgaaatagatatgtaatagtctatatcatcattcatgagttcatcaactaattctatttgattatagttatctggtattttttttctgacatgattgacagcattttgataatctcttaccatgtctaaacgattttgtttcaccatgtttttgctccttataatagtttatgatgtcgtttacagtattaaaattactcttcaaatgttgcataatataaaaagttatacctcacatctttatcatcaatagtagtcactggtctgtctgatttaccaatttctttgtataaagtgtcaatttctttaatatatttatacatagaagaattattatttttagcttgtaattcatataaagcatatttatgttttttagcgtttttattattagattcatctttacggttatatatttcaagtatatagtttaattgttcatgtcttttacctcttaccaatgatacggcatttgcatatgacacgtttctttcttttggaaaatagggcaaatgtgcgaaatgtttccatgtgtctatgtacgcctcttgtaaatctttatcatcaaatttaaaattaacagtactaaaatcatttaaaaacaattctttttcctgctcttttcttgcgtctctttcttttttccatttatccatttcggacgtatgtctaaccattgctaacgacctccatataacccatatataaccactaaaaagataatgtagaatataatcaatgtagtaaataaaacaccaaatgacacacgtatatgcattgtcataagtattacaagtgtaattaaaaatgctaaaaggaaaataatagctatgtttaatatattagtcatgttctatcacgttcccgttattatatatcactttgttttgaaaaattattgttatattactttctattggtttctcgaaatattctaatacgtcatcaatagtacaatccataaaaacttcttttttatataatgggtttaaatgttctcgataaaaaacctcaagacaactaaaactatatgtacgaacatcaacgtcaatgtctaaagtaaataaatcattgtattttgtatcactatcatagtattcaatagaaatttcaccgtatctaacaaaaacaacacattttccacttagtgattcaaattttgttattttattcataaaacaatctctattatctaaaatataattaattaatttttttgtgtttaatattgttgtaatattcattttatatctccttaatgtattttacacaaagattatatgcaccttttttgtaaaagtttgcgtcaaaataactatatattaccttaactttatttattttttcgaattgttcaatttcatgttcatatgtttcattaattgatacattgtataataatacggcagtgtatattttttccattgtttagcacctcataaaaataggggataaatatcccctataaaattgtattaaaatgatactggaccaaagttgattgagtaacctttttgaccttttttgttttcatattcataaattgtaaattgcacttcaccagcattgataatgttaacaacgtcctcgtcttgacgcatgtctttaattaattcagttaagtgattcggtaagtttacgttatagtcgtcagtgacgataacaccttgttcaccgaattttgattctttgtttgtgaataatgctctaacgatatactcttttttcataccgtatttttctactaattctgatagtttaataaattctctttctttttcctcaaattcaaatctcgctaatgtgttttggtgtcttgataaaatatcttttacgtttgtcatttttatttctcctcttatttaaattatttgctttctggaattgaaatttgtagtaaatcattgtaataaacttgaattgttttcgttgtgcgtgtagtggataaaagtttgtgtgaattaggtaataaatcttttgcttgtgtttttgataaatgatactcatgaagtggaataaattcttcaacatattcatttttatcatctaaatagtgaagaatataacctttaattcgtaatgtaacaatatcatcaggtttcattattatatcactcctttctaaaaaacgtaaacgttatacgtttcataaaatcctttgtgcatattccattgttctattgggtcatcaccagcaatgtaagataaaatagattctggtttagtttcgttgtttagttcatcatttaagaattgaacaacagaactattatagtttaataatagttgttggcaagccgatactaagttaattgcattgtcgaaagtataagctggattccattgaataagtttattgaatagttgcaacatttcagtatatgcttgacctttttctgcaggtgcattatcaacattaaccattattatcactccttaaatcattgatttcattccttaattcatcaacgatttttttaggtgaattatggtctaattgttcaaaatcgtccttttcaagtacaaataatgttaattcataagttgatgtattacccataacaataactatattaccattttttaaaatgtaagtttgtaaaggttgtacattttccattttgttacctccttgatttgattacatacatagtatagcaaacgtttaaaagttttgtcaatggtttttcttaaaaagtttaaataatttaaaaatactatttaatagaagaaattagattttaaatacaaatcataattttgaataaaagtcaatagatacatatattttgtattttatgaatatgttataggtttgataagttggaaaagtagaagcacagtttttataagtttagtaaagaaatgataagttaatttataag

SEQ ID NO: 98 - DNA, 18139 bp, Rosenblumvirus sp.
  source 1..18139: mol_type = genomic DNA
gtttttgtaaaattacacctccccaccgtttaaaataaacgattatacaaatcaaaacttataaattaacttatcatttctttactaaacttataaaaactgtgcttctacttttccaacttatcaaacctataacatattcataaaatacaaaatatatgtatctattgacttttattcaaaattatgatttgtatttaaaatctaatttcttctattaaatagtatttttaaattatttaaactttttaagaaaaaccattgacaaaacttttaaacgtttgctatactatgtatgtaatcaaatcaaggaggtaacaaaatggaaaatgtacaacctttacaaacttacattttaaaaaatggtaatatagttattgttatgggtaatacatcaacttatgaattaacattatttgtacttgaaaaggacgattttgaacaattagaccataattcacctaaaaaaatcgttgatgaattaaggaatgaaatcaatgatttaaggagtgataataatggttaatgttgataatgcacctgcagaaaaaggtcaagcatatactgaaatgttgcaactattcaataaacttattcaatggaatccagcttatactttcgacaatgcaattaacttagtatcggcttgccaacaactattattaaactataatagttctgttgttcaattcttaaatgatgaactaaacaacgaaactaaaccagaatctattttatcttacattgctggtgatgacccaatagaacaatggaatatgcacaaaggattttatgaaacgtataacgtttacgttttttagaaaggagtgatataataatgaaacctgatgatattgttacattacgaattaaaggttatattcttcactatttagatgataaaaatgaatatgttgaagaatttattccacttcatgagtatcatttatcaaaaacacaagcaaaagatttattacctaattcacacaaacttttatccactacacgcacaacgaaaacaattcaagtttattacaatgatttactacaaatttcaattccagaaagcaaataatttaaataagaggagaaataaaaatgacaaacgtaaaagatattttatcaagacaccaaaacacattagcgagatttgaatttgaggaaaaagaaagagaatttattaaactatcagaattagtagaaaaatacggtatgaaaaaagagtatatcgttagagcattattcacaaacaaagaatcaaaattcggtgaacaaggtgttatcgtcactgacgactataacgtaaacttaccgaatcacttaactgaattaattaaagacatgcgtcaagacgaggacgttgttaacattatcaatgctggtgaagtgcaatttacaatttatgaatatgaaaacaaaaaaggtcaaaaaggttactcaatcaactttggtccagtatcattttaatacaattttataggggatatttatcccctatttttatgaggtgctaaacaatggaaaaaatatacactgccgtattattatacaatgtatcaattaatgaaacatatgaacatgaaattgaacaattcgaaaaaataaataaagttaaggtaatatatagttattttgacgcaaacttttacaaaaaaggtgcatataatctttgtgtaaaatacattaaggagatataaaatgaatattacaacaatattaaacacaaaaaaattaattaattatattttagataatagagattgttttatgaataaaataacaaaatttgaatcactaagtggaaaatgtgttgtttttgttagatacggtgaaatttctattgaatactatgatagtgatacaaaatacaatgatttatttactttagacattgacgttgatgttcgtacatatagttttagttgtcttgaggttttttatcgagaacatttaaacccattatataaaaaagaagtttttatggattgtactattgatgacgtattagaatatttcgagaaaccaatagaaagtaatataacaataatttttcaaaacaaagtgatatataataacgggaacgtgatagaacatgactaatatattaaacatagctattattttccttttagcatttttaattacacttgtaatacttatgacaatgcatatacgtgtgtcatttggtgttttatttactacattgattatattctacattatctttttagtggttatatatgggttatatggaggtcgttagcaatggttagacatacgtccgaaatggataaatggaaaaaagaaagagacgcaagaaaagagcaggaaaaagaattgtttttaaatgattttagtactgttaattttaaatttgatgataaagatttacaagaggcgtacatagacacatggaaacatttcgcacatttgccctattttccaaaagaaagaaacgtgtcatatgcaaatgccgtatcattggtaagaggtaaaagacatgaacaattaaactatatacttgaaatatataaccgtaaagatgaatctaataataaaaacgctaaaaaacataaatatgctttatatgaattacaagctaaaaataataattcttctatgtataaatatattaaagaaattgacactttatacaaagaaattggtaaatcagacagaccagtgactactattgatgataaagatgtgaggtataactttttatattatgcaacatttgaagagtaattttaatactgtaaacgacatcataaactattataaggagcaaaaacatggtgaaacaaaatcgtttagacatggtaagagattatcaaaatgctgtcaatcatgtcagaaaaaaaataccagataactataatcaaatagaattagttgatgaactcatgaatgatgatatagactattacatatctatttcaaaccgttctgacggaaaatcgttcaactatgtttcattctttatttatttagctataaaacttgatattaaatttactttattatcacgtcattatacattacgtgacgcttatcgtgattttattgaggaaatcatagacaaaaacccactattcaaatctaagcgtgtcacattcagaagcgctagggactatttagctatcatctatcaagataaggaaatcggtgtgattacagatttgaatagtgcaactgatttaaaatatcattctaactttttaaaacactaccctatcattatatatgatgaatttttagcacttgaagatgactatttaattgacgagtgggataagttaaaaacaatttatgaatcaatcgaccgtaaccatggtaatgttgattatattggctttcctaaaatgtttttactaggtaatgcagtcaacttttcaagtcctatattatccaatttaaatatatataacttattacaaaaacataaaatgaacacatcacgactttacaaaaacatttttttagaaatgcgaagaaacgattacgtaaatgaaaagcgtaacacacgggcattcaattcaaacgatgacgctatgactactggcgagtttgaatttaacgaatataatttggcagatgataatttaagaaatcatatcaatcaaaacggtgattttttctatattaaaactgacgataaatatataaaaattatgtataatgttgatacatttaatgctaatattattgttataccttatacaaaacaatatgaattttgtactaaaatcaaagatatagatgacaatgttatttatttaagagaagatatgttttataaagaaaacatggagcgttattattacaatccaagcaatttacattttgataacgcttactcaaaaaattacgttgttgataatgatagatatttatatttagatatgaataaaattataaaatttcatataaaaaatgaaatgaagaaaaatatgagtgaatttgaaagaaaagaaaaaatatatgaagataactatattgaaaatacaaagaagtatttaatgaaacaatacggcttataaaaggtgtgtaagattatgggattactagaatgcatgcaatatcataaacatgaacgtcgaatgattttatactgggatatagaaacattagcgtacaataaagttaacggacgaaaaaaaccaaccaaatataaaaacgtaacgtattcagtagcaattggttggtttaatggttatgagattgatgtagaagtatttcctagttttgaatcgttttatgacgcattttatacgtatgtgaaacgacgtgatacaatcactaagtcaaaaacagatattatcatgattgcacataactgtaataagtatgacaaccattttttacttaaagataccatgcgttattttgataatatcacacgtgaaaatatatatttaaaatctgcagaagaaaacgaacacacactaaagatgcaagaggctactattttagctaaaaatcaaaatgtgattttagaaaaacgtgtgaaatcgtctattaatttagacttaacaatgtttttaaatggatttaaatttaatattattgataactttatgaaaacaaatacatcaattgcaacattaggtaaaaagttgcttgacggtggttatttaacagacgaccaacttaaaacagattttaattacacgatatttgataaagataacgacatgtcagatagtgaagcctatgactatgccgtaaagtgttttgctaaactcacacctgaacaacttacatacattcataatgacgttattatattaggtatgtgccatattcattatagtgatatatttccaaattttgactataacaaattaacattttcattgaatattatggaatcgtatttaaataatcaaatgacgcgttttcagttactcaatcaatatcaagatattaaaatatcatatacacattatcatttccatgatatgaatttttatgattatatcaaatcattttatcgtggtggtttaaatatgtataacactaaatacataaacaaacttattgatgagccttgtttttctattgatatcaattccagttatccttatgtgatgtatcatgagaaaattccgacatggttatacttttatgaacattattcagaacctacattaatccctacttttttagatgatgacaattatttttcattatataagattgataaagatgtatttaacaatgatttattaattaaaatcaaatcacgtgtattacgtcaaatgattgtaaaatactataataatgataatgattacgttaatattaatacaaatacattaagaatgattcaagacattacgggtattgattgcacgcatatacgtgttaattcgtttgtgatatatgaatgtgaatactttcatgcacgtgatattatatttcaaaactattttattaaaacacaaggtaagttaaaaaacaaaatcaacatgacatcaccttacgactatcatattactgatgacatcaacgaacacccttactcaaatgaggaggttatgttgtctaaagttgtacttaacggattatatggcatacctgcattacgttcacattttaacttattccgtttagatgataacaacgaactatataatatcattaacggttacaaaaacactgaacgtaatatattattctctacatttgtcacatcacgttcattatataacttattggtacctttccaatacttaactgaaaatgaaattgacgacaattttatttattgcgatactgatagtttgtatatgaaatccgttgttaaacccttattgaaccccagtttattcgacccgatagccttaggtaaatgggatattgaaaacgaacagatagataagatgtttgtactgaatcataaaaaatatgcatatgaagtgaatggaaagattaaaattgcttctgctggtataccgaaaagcgcctttgatacaagcgtcgattttgaaacctttgtacgtgaacaattctttgacggtgtgataatagaaaacaataaaagtatctataacgaacagggtacgatatcgatttatccgtctaaaacagaaattgtatgcggtaatgtatatgatgaatattttactgatgaacttaatatgaaacgtgaatttatcttaaaagacgctagagaaaattttgaccatagtcaatttgatgatattctttatattgaaagtgacatcggttcattctcacttaatgacttatttccagttgtacgttcagtgcataataaatctaatttgcatatattaaaacgtgaacacgatgaattaaaaaaaggcaactgttaaataacagtcgcctttttcttttgatataacatgaaaaatgtgtacgaaaattgattatgttttgtattttatttactagcattactagcatgttttcattatagcatagttaattaagcaataccactgaagaatacaatattatcaccagcgttatgaggtacaccattaatcaatgtatataatacaacccgtgacggtgccacgtatggtgggacgttatagtttgctactaagaatgaaccatcgtcaaatactgctacaacgacacctgtgtgaccaatgccatatgctgttgcttgtaagtatggtggtttacttgaaaaaccataccctactgttggattatgtgttgtttttgcacctaactttttatatacgtaccacacacgttgaccgtttgttatttgaccgtcgtctgttggttgtcttttaccatgtaattgtgacatatatgcccatgttaattctgtacattgtcctgcattacccgtttgaggaaatatgttacctggtttgtacaagtattcttttttgaataaaggtacaccaattgcttttttatatttttctggtaactgtgcatacgtccagttaccaccaatgacgcgtccacttttaccatttggtttgactgacttaccactaattggtttatggtccccgtcatcatcagtagggtttgaactactatccccactatctacttgcacactatcaatcagtttttttaatgaatcaagtagcccaatcgtcattttaatatgatatgtgttgttaaatgttttttgtaatgtaaaataatcattactaaaaaatttatcactaccaatactgtgtacatcccattgtaatgcgtcttgtactttttttaataattcttgcatggcttgttttgctaaagcgagcagtgaactaccactgtcaccactactaccactgtcagacgaatcactaggtgaaccacctttaccgtctaatttaccaccccatgctaaaatagtatttgcaccgtctaaaaaaggattaccatagttttgtactttattatatgacgctttcaaacctaggggataatatgccgcccaagtagccgctgctgttaatggaatatacgcacgtccgattgtacctgctttcatatttttagcaaaatctgcattaccttttctttgtacgtcttgaggtacaaagtgaacgatgttacctgcgtcataccaagacggttgtcctgcttgttttgattgtgatactaattttcttgcaatgaatttagcgtctgttaaatagtcacctcgtgcagatgtatggttcaaccaacctaaaccagcgctatacccttcatttttttcatatacagcaaaaagagtaggtgacacacctatctcttttactgcttttaatacttgtctgattttactttcattaccacctagccatacattaaagcgtccatacccttttactttagggactaactggtctatcgttaaaccgaaatcatcattaatatacgaatgcgtaaatttatctatcttctcttggtcgttcattattatcacccttttcagaatcgtttttaattactcttaatttatctttaatttgttcaggcactaatacgtccatttcagcacaattttcaacaatagatagtccctcatttgcgatataatagaaaatcgtaatcatgagtaaaccaccttttaattgtaaaatctggtcaatgatgttagctaaaatgataatacagaatatcaataattttttagcaaaacctttcattgattttttagaccatagattattatttttaattgctttagcaaaaccagtaacaacatctataatcatcaaaacaaataaaaaatatagtaactttaaatcacctgcatatatgaacatatgaaatgcttctgtgtccgtaaatcttaattttacctcattcattttatacaccttctctaaatttattatttaacgggttctgtaacattggattacctgaaccgtcattatgccaaaatctcacaccagattctaaaattgcttttaattgttccattaacatagggtcaatgtcacgtatggtatacgtacctgtacattttaaatagttgcatacagtcatgctgttaataggttcaatgaatgtattatagtcatttacttcaaaaccaaacaacatataatatttttgtaaaaatgtaatttctttaggtgacggtacactaattttcatcgttaaaccgttaatgctatttgcaatttggaatgcgtttcccatttctgattctgtcacagatggtggttgtaaggctaaatctttatattctgcctgttgttgtttgtagaaattatattcttcattaaacttaccaaataaagcggttggacttaaattacttgctacacttacagcgtcataaaaacgtgattttgggtcactaccatttaatacattatctatacgacttgtgattaattgactttctgcattacgctgtctattggcttgttgtgattgtcctaaaattccgttattaattaatataggcacttgcgcaaaactattaaatgttatattggtatttaagaatgaacctgtatcaattaatatatctttatttttagcaagtatcggtctatcgttttcagcactgttataatcaactggatatactcgcacttcattatgataaccaatgatggattttgtacgtaacttaacacctgttttttgtgaaattttaccagcgtcaagtaacattgtgttaccgttccagtcataaaattcaatcgtcatgtactcattacgtatcatatgtttaaactcgtcttttttagacaacatcatctcttgaagctttgtgaaacttaatgataaatcgtttaaactccattcttttgattttccaccctgttttaatgtctttaatccagtaattttttcacttgtcttaacgtcctctaaatcttttgtattaataaaatctttaggtaacatttgaaccttttgaaagttttgtgtaatccatggatatgcactcattttatccataaagttaataaagtcaccatattccataacgtataagttgactggcgatgtgatattgtcatatatcgtacctttagacgtatctaagtttggctcttttttcgtaccaaatttctttgataaatcagcgcttgactggaataacactaaattttccaaatactgttgcatttggttatacacatagtttttatttgatacttttaacacatcatcattgttacgtaacatcggcaacatatagttatacgtacgctttgataagtgttgacgttcaatattaacgtttgaaagttgttctaatacattaccttgtgtatacgtcataatagtatcaatcacaaaatatatttttaccacaacatcattcacatattcgatttgattcacaaaagcgtaatagcgtctatcctcaaaatctgataaaaacgtcatgtagttaatcccttgtgcgtcatgccactgcatatcaacattgatttccattctatcacgtataaaattatacggttgtttggaatagtctaatgatttaaaatgacgaccgtttaaaaaataatcatcacgctctttattactattaaaatgaattgtattttgatagtctgtaaacggtgtgttatagaaaaatttaaaatttgttaattttctcatttttacctccataaaaaatagtcgtataaataatttatacgactattataacatttttattcaatgatttgtgtatctattgcaaaacgtttatctccatttgttaagtcactatcgctataatttgatgtaacaaaatgtaattcattattaaagtttaaatataatcttgtattcatcattttattatcaatcgcacattgtgtgtagtgatgtgttgattttaagtttgcgttaatcgtacctaatttaatatcaccgtttttcttaatcccttttaataccccttttaattgtatggttttaacaccattaattgttacaatacgatattgcggtgcgggataacccccgttgctatcacttgcaacaataccactttcaagttgcacatcttgccaacctgtatcattaaattgtaattttgcactgttaattttttgatcaaaattttgttcaatttctgatttagattgtgcaattttagtatctatatttaagttatccacttttgttgataaaacgcttatacttgattcgtttgttgatgttttttgttttaaatcactaatatcattatcatattttgataaatcaatatgaccgtttccgtcaacaactggtctgtcttttaattcttgaataactttttcaatttttgatattttatcattatttgtttttaaagtagcgatgtcagatttaattgaattaatatcctgtgtataatctttttggttaatactgtttaattttgtttctaactcttttatcttatcaaggttggtatttgctttgatgtcattaatggtttgttctaaactttcaagtttcccagaacttgaattttgttttaacttattaatatcctcttgtatttcttgaattgtgttgtcattgttttgtttagattttaataattcaatttgactttctatgtcttttattttatcaagattaacactttttttaacttcagctaattctctttttaatgcgtcaatgttttctgcaccagtatttgatttaattatattaatttcatttgtgtttcgtcctacactatctttagtagcgtttaaagattgtgtaagtgtttcatatttatcatcatactttaacattgatttttcaaattcatttaattgtgtttgatgttgttctaaactttcatttaatatgacatttttttcttttaatgaatcaatgtcttttttattactatcaatcattggttggaatttttttattttctctagaaatgttgatattttttctttgttatcattaattgcaatatcatgatgttctatttgaccactgtatttattaatcaatgtttttaaatcattataaaatgttaatttataataaccagtatcagtacggacataaatatgtccgtctgatgtactgattaagtcattttcttctgttaaaaaatctgctaacctgtctattgtttcaacttgtcttaaacttcttacgattctatcagccattgttcacacctcttatttgtatcgtttccaactaaactcaaagaaaaaacctaaaatacccattatgagaaaaccccccaaggaataccaacactataactattacccgttttaccgttccattttcttactggtaaataataacgtgtaccttgccagttgtaaccaatccatacatacccatctgataaacaaacttcgtcatatggtgtataaccatttggttggaaccaatatccattaggttcacttaatttaggactacctacacgtgcaaatattggtaaaaatccacatgtaaatgttgcattttcatttctgtaatatgtgccatattggttttgtttccattttccgaatgtgtttacttttgatgtttctaattcgttgctgttactagcagaaaatttaggtctaataaagtgtgttacaccgtcataataatgtgttcttattgttgctttttcccaaccgtcaaacccaccacctaaccagttttgctctaaacatgtataataatctaaattaccacttaacacacattgaatatgtccatattgtccatctgtatatacaccaacatcccctaattgtggtttaaagttcggtgtattttcatacaccattgctaaacctttaaagtcattattgattgcgtctttagcgttaccccacatacgaactttaccgtctgtaatgtaatatatataagcaacagctaagtcagcgcattgataaccaaatgctaaatcaaagtccacacctacaccctcatgcttatatatccattcttttgcttgttgttgtgatttcatgaaacattatcctttcttaacccaactatattgacgtttttttgtatctgcattaacgttactaaagaattctttatgttcggacacattagcctctaatgtttgtcttacttcaccgacagcgttaccacttgaaacacgtaaccatgcacccacttttttaatttcttctggtgcgtctctaaacaattccatttggttaccagtaatataatattcaccaggtgtcgtaacgtaagctatccagttattgtattgacttgcttctaaatactcttgatatggtgcgtctgttttgattgttgtccataaaccataatcccattttaatgtaaatacatcgagcgtcataccacgcatgattttaaccatttttcgaccagtagaaaaacgcgttaattcttgtactgtacctaatgtttgtgttgtagggtatacattgatgaaacaaccagcgtctataatttttttactaccattcattggcatatttttaagtttactagctgtaccaccgtcaatataatagaaccctgcttgtgttaagtcatttaagtcgtcaatatggtctggaattgataacgcacgtccatcgtcttttgttaatttatagttttgtgaacctctcgcacgtaatgcttcaaagtgttcatactcaccaagttgaaagaacccatataaattattgaatcgttttccaccaccgccattagtcatagcaagtaataacgatttacgttttgtttttggattggtataaatacaaataccctccggctctttaaagttatcacgtggaaaattaataccgtcttgatatgataatttaaacggataatcataaatcttttgaccagttgttaatgaatatttaccaatttgaacgtgtgaattaactgaactgttaccacttaaccagtataaatcatcaccatcaacggcaatcccttgcatccatcgattatcattgttttctgaattatcaatcgtcatttctttttctacattatcaatgtgattttttacgtcagctcttgaacgtacctgtattgtcccgtcaccgaatcttaaaacgattttgtcattttcttcatcaattaacggtgtaaacgtgtgtttgtttaaaagtgactgtggtgtataatctgttaaccctttagcctcttctaaatctaaaatataattatctttatatgcgacttgtaacagttttgctacaccgtcatgatgtaaccatattttcatttcaccgttagattgtctttctaaacctattgtagtaccgtgaccaccttgtacaatacgcatactagaaattaagtcaccgctaggcgttaatttattaatccaaaaaccttctgggttttgtgaatctgattgtgtagagtacatttgattcgtttctttatctatgtttatagattggttaacagcattacgaataccaccgaatcccataacaaactttggttcaagctcatttaattcaaaaccattaacaaaacggtcaatgtctttaattaagtctttaacttctgatttaaaatcattcatttgtttcatttctgcaactttaaataatgcaaatgcagatgtaagaccagtactatatttagtaaattcatcatgaataattttatctattgtaccgtcgtttaaccaacctctaaataagtctttcgcttggtctgggaatgctttcattaagtcgtcccaatttttgaaacgtttttttaattcattgtcatagtcccaaatacgacgtgctaatacttcaattagttttgataatcttgaaatataatcataatatgattttgaattggtattataatctgctctatcatcgtaaaacggtgtgtaacgttctctcgttttatatatttcgtctaaaaatggacgaatgtcgtcaaaatatttaaaatcgttttcattatatgccataattttccacctttaccaaatttgtaaaaaacattttttatcaaattcatttaaaattttctttcttaaatcgtatactttatcaatattatcaattaaatactgttttgaaaattgtgtacctttcgcattacctttttgattttgattacgttttgcgttttgattactttcgttacttgatttattcacagttttaccgttgtcaattgtattattatctgcaaatcgtaacgttgtgttatctacatcaatgttaacctcgctttgtggtaatgacgcataagcatttctgttcgctgtcatgccagttgaattgtctaaagatgttgcattttgatttgaggtttcatctgtattgtttgttgtatcttcattatgttctgtaaaaccttgtgattgtagatatttttcaacttcgcttgatgaataaaccacattcaaataatcctcatgtgtgatacatacagtaatcacttgcatgccaaaagcttcaactgtttgtctgttgatttctctatctaaaaagtgtattgtaaatgattttttaaaaagtaagtcagataagtcatctttaagtttaaaacctttaaacactttttcattaacgatggctaaaacgtctttgtcaaacttcaacattttttgcatgaattgaaattcatcatcataaaacgttaatttatcattatttacaaattcattaaaaccttttttaattaattctgatttaataaaatcaaataaagtcattgtatatctagccattgtattcactactttcatcattagacaatgtatctatcattgtgatttctgaagtaacttcatcgtcgtaatacggtttaatatctaaaccataacgttttgataagaatgtaatcggttcacgaccttttaaataaatattactatttgatgtggtaaaacctcggttgctttttgcctcttcgtccgaaacaccgctttccttatccactgctagtgagttaatacctaaatagttacttaattcactaattttattttggtattcgcgtttcatctcagttagtgctggaatcacactattactggttaaatctatgatatcatcatcggcgttaaacataggtgacattttaacaaatggtgcaccgttgtatatttccgatacaagttgattaactgactcatcattaatgtctgatttaaatattttgctaaattttgcttgcataattaatgagaatctagataaaacaacctcagataattcatcagtataatgttctataatttctatatcactattatattgaattggtttattttgcatgacaacaaagttaccactcatacagttatcatatattttatgaatctgtaagcattcatctggtattaaatagtctggaacaatgaaataaatatcatcttttgttaatcgtttttgaaattgaaagttaaagtttgatgaaaaatttggtgcttgattaaagtaagtattatttacgtaaccaagaatcataatttgttcatttcttgctttgccgaccactacattgatgttttgtcttaatgctgattctaattgaataaaatctataccaaccgtatcacgattggtatagttgatgagtagtggtaaaaattccaaataacgattaaacataagacgtttaaatctgttgcgatgttctacaactcttttgttgatttcttttgataattcaacctgtacacctttattatgtttagtcatttatagcacctctattattctgttcttggtgttacatcttggtcagtaattaaaattttattaaagaatgggctaatggctttaaatgaatagtaatgaatccagtgtgtgacttcatcaaattcaccattatagaatggttgttttaacataccttttgtgtaacgtttatatttaattgaattaatatccaaaataaacgcgtataaatctgattttggtttaatttcttcaacattatctttaaactctgatagttttgacacatcataagtgaatactgaaccaactggaattgtatcacctttatgagtttgataatcaccgtaagcacgtaagaaagctactgattcatcacttgatacgacaatatctttagtgactttgaaaacaccacctaggtcgtcaaaactgataacgtggtctgtaaagtcaatccctgctacttggaatgtgttcgcaatctttgtatctaaaagataagattttaagctatcagtcgttaaaataacaatatcttttaattttgaaactgttgtatattgtccgattgcaccacctgaagcacgatgaacttcattatatttagcgctgttgttttgtaagttaagaatagcttcaaaaactttacttgctaaatcttcttttgatgttgctttacgtacatttgattcagataattgattcaatgagtaatcaactaacattgcacgcatttctttttcttctaatacgttaatatcagaaattttctttttatagacacctaatgcataattagtagcgtctgctaatgtttggaaattgaaacgtgtgtcattgttatttaatgtaaatttttgtttcttcacaataccactaccatataacttagtagccatacgtggatagttacgtttcaacattagttcttcatttttagataagtccatgttaataggtactgtatccataattacatattcttcactgtattgacctataaagtcctgctctttagctaaccaattaaaacggttacctaatgcaatatcgattaataacgtttcattaatcttagggaataaaaatttatttacaaatgtttcaaacattgtattagaattatcccacttatcgccaaacgtccatgattttgaataagtatgattaaagtcttgtaatgcagatttagctgactttgcaactaatagtgctgtttcgttttttgtactcttttctgccatgatttattattcctcctcaacatcgccagtaaatgactgttttgaaagtgaatgaatttgtacaccataactatcttcacttttatttgtatcaattgacatattttcatttaattctgttcgtttatttaatcttgaatcttcatatgatgtacccatcatagaacgcatgttgttaccctcgtacatgtttaagttcctcctaatctaaatctaatttatcgacaagttcttcatctgaatagtctttatcattgttatctgtttcttttgattctggttgtggttgtggttgtggttgtggttgttgcatttgtgatgtttcaaaattagtaaatcgttgttctaatgaagcgatacgttgttctaaaacaactgggtctaattttgcacaatcttcatctgttgtagtaggttctaatttgttttcattttcttcttcgattgtttctactgttttatcttcagttgattcttcagttgattcttcagttgattctgaagtttcttcagttgattctgaagtttcttctttgtcgtctggttttacgatttcatcaaattctgtcattttgacacctccaaatattttataactaattatatcatagaatatttaaataagtaaattaaatttattttattttcaaatcataactttgaataaaagtcaatagatacataaattttgtatttaatgaatatgtaataggttagataagttggaaaagtagacgcacagtttttataagtttagtaaagaaatgatatgttaatttataagttttgatttgtataatcgtttattttaaacggtggggaggtgtaaatttacaataactttttccc

SEQ ID NO: 99 - DNA, 18109 bp, Rosenblumvirus sp.
  source 1..18109: mol_type = genomic DNA
atttacacctccccaccgtttaaaataaacgattatacaaatcaaaacttataaattaacatatcatttctttactaaacttataaaaactgtgcgtctacttttccaacttatctaacctattacatattcattaaatacaaaatttatgtatctattgacttttattcaaagttatgatttgaaaataaaataaatttaatttacttatttaaatattctatgatataattagttataaaatatttggaggtgtcaaaatgacagaatttgatgaaatcgtaaaaccagacgacaaagaagaaacttcagaatcaactgaagaaacttcagaatcaactgaagaatcaactgaagaatcaactgaagataaaacagtagaaacaatcgaagaagaaaatgaaaacaaattagaacctactacaacagatgaagattgtgcaaaattagacccagttgttttagaacaacgtatcgcttcattagaacaacgatttactaattttgaaacatcacaaatgcaacaaccacaaccacaaccacaaccacaaccagaatcaaaagaaacagataacaatgataaagactattcagatgaagaacttgtcgataaattagatttagattaggaggaacttaaacatgtacgagggtaacaacatgcgttctatgatgggtacatcatatgaagattcaagattaaataaacgaacagaattaaatgaaaatatgtcaattgatacaaataaaagtgaagatagttatggtgtacaaattcattcactttcaaaacagtcatttactggcgatgttgaggaggaataataaatcatggcagaaaagagtacaaaaaacgaaacagcactattagttgcaaagtcagctaaatctgcattacaagactttaatcatacttattcaaaatcatggacgtttggcgataagtgggataattctaatacaatgtttgaaacatttgtaaataaatttttattccctaagattaatgaaacgttattaatcgatattgcattaggtaaccgttttaattggttagctaaagagcaggactttataggtcaatacagtgaagaatatgtaattatggatacagtacctattaacatggacttatctaaaaatgaagaactaatgttgaaacgtaactatccacgtatggctactaagttatatggtagtggtattgtgaagaaacaaaaatttacattaaataacaatgacacacgtttcaatttccaaacattagcagacgctactaattatgcattaggtgtctataaaaagaaaatttctgatattaacgtattagaagaaaaagaaatgcgtgcaatgttagttgattactcattgaatcaattatctgaatcaaatgtacgtaaagcaacatcaaaagaagatttagcaagtaaagtttttgaagctattcttaacttacaaaacaacagcgctaaatataatgaagttcatcgtgcttcaggtggtgcaatcggacaatatacaacagtttcaaaattaaaagatattgttattttaacgactgatagcttaaaatcttatcttttagatacaaagattgcgaacacattccaagtagcagggattgactttacagaccacgttatcagttttgacgacctaggtggtgttttcaaagtcactaaagatattgtcgtatcaagtgatgaatcagtagctttcttacgtgcttacggtgattatcaaactcataaaggtgatacaattccagttggttcagtattcacttatgatgtgtcaaaactatcagagtttaaagataatgttgaagaaattaaaccaaaatcagatttatacgcgtttattttggatattaattcaattaaatataaacgttacacaaaaggtatgttaaaacaaccattctataatggtgaatttgatgaagtcacacactggattcattactattcatttaaagccattagcccattctttaataaaattttaattactgaccaagatgtaacaccaagaacagaataatagaggtgctataaatgactaaacataataaaggtgtacaggttgaattatcaaaagaaatcaacaaaagagttgtagaacatcgcaacagatttaaacgtcttatgtttaatcgttatttggaatttttaccactactcatcaactataccaatcgtgatacggttggtatagattttattcaattagaatcagcattaagacaaaacatcaatgtagtggtcggcaaagcaagaaatgaacaaattatgattcttggttacgtaaataatacttactttaatcaagcaccaaatttttcatcaaactttaactttcaatttcaaaaacgattaacaaaagatgatatttatttcattgttccagactatttaataccagatgaatgcttacagattcataaaatatatgataactgtatgagtggtaactttgttgtcatgcaaaataaaccaattcaatataatagtgatatagaaattatagaacattatactgatgaattatctgaggttgttttatctagattctcattaattatgcaagcaaaatttagcaaaatatttaaatcagacattaatgatgagtcagttaatcaacttgtatcggaaatatacaacggtgcaccatttgttaaaatgtcacctatgtttaacgccgatgatgatatcatagatttaaccagtaatagtgtgattccagcactaactgagatgaaacgcgaataccaaaataaaattagtgaattaagtaactatttaggtattaactcactagcagtggataaggaaagcggtgtttcggacgaagaggcaaaaagcaaccgaggttttaccacatcaaatagtaatatttatttaaaaggtcgtgaaccgattacattcttatcaaaacgttatggtttagatattaaaccgtattacgacgatgaagttacttcagaaatcacaatgatagatacattgtctaatgatgaaagtagtgaatacaatggctagatatacaatgactttatttgattttattaaatcagaattaattaaaaaaggttttaatgaatttgtaaataatgataaattaacgttttatgatgatgaatttcaattcatgcaaaaaatgttgaagtttgacaaagacgttttagccatcgttaatgaaaaagtgtttaaaggttttaaacttaaagatgacttatctgacttactttttaaaaaatcatttacaatacactttttagatagagaaatcaacagacaaacagttgaagcttttggcatgcaagtgattactgtatgtatcacacatgaggattatttgaatgtggtttattcatcaagcgaagttgaaaaatatctacaatcacaaggttttacagaacataatgaagatacaacaaacaatacagatgaaacctcaaatcaaaatgcaacatctttagacaattcaactggcatgacagcgaacagaaatgcttatgcgtcattaccacaaagcgaggttaacattgatgtagataacacaacgttacgatttgcagataataatacaattgacaacggtaaaactgtgaataaatcaagtaacgaaagtaatcaaaacgcaaaacgtaatcaaaatcaaaaaggtaatgcgaaaggtacacaattttcaaaacagtatttaattgataatattgataaagtatacgatttaagaaagaaaattttaaatgaatttgataaaaaatgttttttacaaatttggtaaaggtggaaaattatggcatataatgaaaacgattttaaatattttgacgacattcgtccatttttagacgaaatatataaaacgagagaacgttacacaccgttttacgatgatagagcagattataataccaattcaaaatcatattatgattatatttcaagattatcaaaactaattgaagtattagcacgtcgtatttgggactatgacaatgaattaaaaaaacgtttcaaaaattgggacgacttaatgaaagcattcccagaccaagcgaaagacttatttagaggttggttaaacgacggtacaatagataaaattattcatgatgaatttactaaatatagtactggtcttacatctgcatttgcattatttaaagttgcagaaatgaaacaaatgaatgattttaaatcagaagttaaagacttaattaaagacattgaccgttttgttaatggttttgaattaaatgagcttgaaccaaagtttgttatgggattcggtggtattcgtaatgctgttaaccaatctataaacatagataaagaaacgaatcaaatgtactctacacaatcagattcacaaaacccagaaggtttttggattaataaattaacgcctagcggtgacttaatttctagtatgcgtattgtacaaggtggtcacggtactacaataggtttagaaagacaatctaacggtgaaatgaaaatatggttacatcatgacggtgtagcaaaactgttacaagtcgcatataaagataattatattttagatttagaagaggctaaagggttaacagattatacaccacagtcacttttaaacaaacacacgtttacaccgttaattgatgaagaaaatgacaaaatcgttttaagattcggtgacgggacaatacaggtacgttcaagagctgacgtaaaaaatcacattgataatgtagaaaaagaaatgacgattgataattcagaaaacaatgataatcgatggatgcaagggattgccgttgatggtgatgatttatactggttaagtggtaacagttcagttaattcacacgttcaaattggtaaatattcattaacaactggtcaaaagatttatgattatccgtttaaattatcatatcaagacggtattaattttccacgtgataactttaaagagccggagggtatttgtatttataccaatccaaaaacaaaacgtaaatcgttattacttgctatgactaatggcggtggtggaaaacgattcaataatttatatgggttctttcaacttggtgagtatgaacactttgaagcattacgtgcgagaggttcacaaaactataaattaacaaaagacgatggacgtgcgttatcaattccagaccatattgacgacttaaatgacttaacacaagcagggttctattatattgacggtggtacagctagtaaacttaaaaatatgccaatgaatggtagtaaaaaaattatagacgctggttgtttcatcaatgtataccctacaacacaaacattaggtacagtacaagaattaacgcgtttttctactggtcgaaaaatggttaaaatcatgcgtggtatgacgctcgatgtatttacattaaaatgggattatggtttatggacaacaatcaaaacagacgcaccatatcaagagtatttagaagcaagtcaatacaataactggatagcttacgttacgacacctggtgaatattatattactggtaaccaaatggaattgtttagagacgcaccagaagaaattaaaaaagtgggtgcatggttacgtgtttcaagtggtaacgctgtcggtgaagtaagacaaacattagaggctaatgtgtccgaacataaagaattctttagtaacgttaatgcagatacaaaaaaacgtcaatatagttgggttaagaaaggataatgtttcatgaaatcacaacaacaagcaaaagaatggatatataagcatgagggtgtaggtgtggactttgatttagcatttggttatcaatgcgctgacttagctgttgcttatatatattacattacagacggtaaagttcgtatgtggggtaacgctaaagacgcaatcaataatgactttaaaggtttagcaatggtgtatgaaaatacaccgaactttaaaccacaattaggggatgttggtgtatatacagatggacaatatggacatattcaatgtgtgttaagtggtaatttagattattatacatgtttagagcaaaactggttaggtggtgggtttgacggttgggaaaaagcaacaataagaacacattattatgacggtgtaacacactttattagacctaaattttctgctagtaacagcaacgaattagaaacatcaaaagtaaacacattcggaaaatggaaacaaaaccaatatggcacatattacagaaatgaaaatgcaacatttacatgtggatttttaccaatatttgcacgtgtaggtagtcctaaattaagtgaacctaatggatattggttccaaccaaatggttatacaccatatgacgaagtttgtttatcagatgggtatgtatggattggttacaactggcaaggtacacgttattatttaccagtaagaaaatggaacggtaaaacgggtaatagttatagtgttggtattccttggggggttttctcataatgggtattttaggttttttctttgagtttagttggaaacgatacaaataagaggtgtgaacaatggctgatagaatcgtaagaagtttaagacaagttgaaacaatagacaggttagcagattttttaacagaagaaaatgacttaatcagtacatcagacggacatatttatgtccgtactgatactggttattataaattaacattttataatgatttaaaaacattgattaataaatacagtggtcaaatagaacatcatgatattgcaattaatgataacaaagaaaaaatatcaacatttctagagaaaataaaaaaattccaaccaatgattgatagtaataaaaaagacattgattcattaaaagaaaaaaatgtcatattaaatgaaagtttagaacaacatcaaacacaattaaatgaatttgaaaaatcaatgttaaagtatgatgataaatatgaaacacttacacaatctttaaacgctactaaagatagtgtaggacgaaacacaaatgaaattaatataattaaatcaaatactggtgcagaaaacattgacgcattaaaaagagaattagctgaagttaaaaaaagtgttaatcttgataaaataaaagacatagaaagtcaaattgaattattaaaatctaaacaaaacaatgacaacacaattcaagaaatacaagaggatattaataagttaaaacaaaattcaagttctgggaaacttgaaagtttagaacaaaccattaatgacatcaaagcaaataccaaccttgataagataaaagagttagaaacaaaattaaacagtattaaccaaaaagattatacacaggatattaattcaattaaatctgacatcgctactttaaaaacaaataatgataaaatatcaaaaattgaaaaagttattcaagaattaaaagacagaccagttgttgacggaaacggtcatattgatttatcaaaatatgataatgatattagtgatttaaaacaaaaaacatcaacaaacgaatcaagtataagcgttttatcaacaaaagtggataacttaaatatagatactaaaattgcacaatctaaatcagaaattgaacaaaattttgatcaaaaaattaacagtgcaaaattacaatttaatgatacaggttggcaagatgtgcaacttgaaagtggtattgttgcaagtgatagcaacgggggttatcccgcaccgcaatatcgtattgtaacaattaatggtgttaaaaccatacaattaaaaggggtattaaaagggattaagaaaaacggtgatattaaattaggtacgattaacgcaaacttaaaatcaacacatcactacacacaatgtgcgattgataataaaatgatgaatacaagattatatttaaactttaataatgaattacattttgttacatcaaattatagcgatagtgacttaacaaatggagataaacgttttgcaatagatacacaaatcattgaataaaaatgttataatagtcgtataaattatttatacgactattttttatggaggtaaaaatgagaaaattaacaaattttaaatttttctataacacaccgtttacagactatcaaaatacaattcattttaatagtaataaagagcgtgatgattattttttaaacggtcgtcattttaaatcattagactattccaaacaaccgtataattttatacgtgatagaatggaaatcaatgttgatatgcagtggcatgacgcacaagggattaactacatgacgtttttatcagattttgaggatagacgctattacgcttttgtgaatcaaatcgaatatgtgaatgatgttgtggtaaaaatatattttgtgattgatactattatgacgtatacacaaggtaatgtattagaacaactttcaaacgttaatattgaacgtcaacacttatcaaagcgtacgtataactatatgttgccgatgttacgtaacaatgatgatgtgttaaaagtatcaaataaaaactatgtgtataaccaaatgcaacagtatttggaaaatttagtgttattccagtcaagcgctgatttatcaaagaaatttggtacgaaaaaagagccaaacttagatacgtctaaaggtacgatatatgacaatatcacatcgccagtcaacttatacgttatggaatatggtgactttattaactttatggataaaatgagtgcatatccatggattacacaaaactttcaaaaggttcaaatgttacctaaagattttattaatacaaaagatttagaggacgttaagacaagtgaaaaaattactggattaaagacattaaaacagggtggaaaatcaaaagaatggagtttaaacgatttatcattaagtttcacaaagcttcaagagatgatgttgtctaaaaaagacgagtttaaacatatgatacgtaatgagtacatgacgattgaattttatgactggaacggtaacacaatgttacttgacgctggtaaaatttcacaaaaaacaggtgttaagttacgtacaaaatccatcattggttatcataatgaagtgcgagtatatccagttgattataacagtgctgaaaacgatagaccgatacttgctaaaaataaagatatattaattgatacaggttcattcttaaataccaatataacatttaatagttttgcgcaagtgcctatattaattaataacggaattttaggacaatcacaacaagccaatagacagcgtaatgcagaaagtcaattaatcacaagtcgtatagataatgtattaaatggtagtgacccaaaatcacgtttttatgacgctgtaagtgtagcaagtaatttaagtccaaccgctttatttggtaagtttaatgaagaatataatttctacaaacaacaacaggcagaatataaagatttagccttacaaccaccatctgtgacagaatcagaaatgggaaacgcattccaaattgcaaatagcattaacggtttaacgatgaaaattagtgtaccgtcacctaaagaaattacatttttacaaaaatattatatgttgtttggttttgaagtaaatgactataatacattcattgaacctattaacagcatgactgtatgcaactatttaaaatgtacaggtacgtataccatacgtgacattgaccctatgttaatggaacaattaaaagcaattttagaatctggtgtgagattttggcataatgacggttcaggtaatccaatgttacagaacccgttaaataataaatttagagaaggtgtataaaatgaatgaggtaaaattaagatttacggacacagaagcatttcatatgttcatatatgcaggtgatttaaagttactatattttttatttgttttgatgattatagatgttgttactggttttgctaaagcaattaaaaataataatctatggtctaaaaaatcaatgaaaggttttgctaaaaaattattgatattctgtattatcattttagctaacatcattgaccagattttacaattaaaaggtggtttactcatgattacgattttctattatatcgcaaatgagggactatctattgttgaaaattgtgctgaaatggacgtattagtgcctgaacaaattaaagataaattaagagtaattaaaaacgattctgaaaagggtgataataatgaacgaccaagagaagatagataaatttacgcattcgtatattaatgatgatttcggtttaacgatagaccagttagtccctaaagtaaaagggtatggacgctttaatgtatggctaggtggtaatgaaagtaaaatcagacaagtattaaaagcagtaaaagagataggtgtgtcacctactctttttgctgtatatgaaaaaaatgaagggtatagcgctggtttaggttggttgaaccatacatctgcacgaggtgactatttaacagacgctaaattcattgcaagaaaattagtatcacaatcaaaacaagcaggacaaccgtcttggtatgacgcaggtaacatcgttcactttgtacctcaagacgtacaaagaaaaggtaatgcagattttgctaaaaatatgaaagcaggtacaatcggacgtgcgtatattccattaacagcagcggctacttgggcggcatattatcccctaggtttgaaagcgtcatataataaagtacaaaactatggtaatccttttttagacggtgcaaatactattttagcatggggtggtaaattagacggtaaaggtggttcacctagtgattcgtctgacagtggtagtagtggtgacagtggtagttcactgctcgctttagcaaaacaagccatgcaagaattattaaaaaaagtacaagacgcattacaatgggatgtacacagtattggtagtgataaattttttagtaatgattattttacattacaaaaaacatttaacaacacatatcatattaaaatgacgattgggctacttgattcattaaaaaaactgattgatagtgtgcaagtagatagtggggatagtagttcaaaccctactgatgatgacggggaccataaaccaattagtggtaagtcagtcaaaccaaatggtaaaagtggacgcgtcattggtggtaactggacgtatgcacagttaccagaaaaatataaaaaagcaattggtgtacctttattcaaaaaagaatacttgtacaaaccaggtaacatatttcctcaaacgggtaatgcaggacaatgtacagaattaacatgggcatatatgtcacaattacatggtaaaagacaaccaacagacgacggtcaaataacaaacggtcaacgtgtgtggtacgtatataaaaagttaggtgcaaaaacaacacataatccaacagtagggtatggtttttcaagtaaaccaccatacttacaagcaacagcatatggcattggtcacacaggtgtcgttgtagcagtatttgacgatggttcattcttagtagcaaactataacgtcccaccatacgtggcaccgtcacgggttgtattatatacattgattaatggtgtacctcataacgctggtgataatattgtattcttcagtggtattgcttaattaactatgctataatgaaaacatgctagtaatgctagtaaataaaatacaaaacataatcaattttcgtacacatttttcatgttatatcaaaagaaaaaggcgactgttatttaacagttgcctttttttaattcatcgtgttcacgttttaatatatgcaaattagatttattatgcactgaacgtacaactggaaataagtcattaagtgagaatgaaccgatgtcactttcaatataaagaatatcatcaaattgactatggtcaaaattttctctagcgtcttttaagataaattcacgtttcatattaagttcatcagtaaaatattcatcatatacattaccgcatacaatttctgttttagacggataaatcgatatcgtaccctgttcgttatagatacttttattgttttctattatcacaccgtcaaagaattgttcacgtacaaaggtttcaaaatcgacgcttgtatcaaaggcgcttttcggtataccagcagaagcaattttaatctttccattcacttcatatgcatattttttatgattcagtacaaacatcttatctatctgttcgttttcaatatcccatttacctaaggctatcgggtcgaataaactggggttcaataagggtttaacaacggatttcatatacaaactatcagtatcgcaataaataaaattgtcgtcaatttcattttcagttaagtattggaaaggtaccaataagttatataatgaacgtgatgtgacaaatgtagagaataatatattacgttcagtgtttttgtaaccgttaatgatattatatagttcgttgttatcatctaaacggaataagttaaaatgtgaacgtaatgcaggtatgccatataatccgttaagtacaactttagacaacataacctcctcatttgagtaagggtgttcgttgatgtcatcagtaatatgatagtcgtaaggtgatgtcatgttgattttgttttttaacttaccttgtgttttaataaaatagttttgaaatataatatcacgtgcatgaaagtattcacattcatatatcacaaacgaattaacacgtatatgcgtgcaatcaatacccgtaatgtcttgaatcattcttaatgtatttgtattaatattaacgtaatcattatcattattatagtattttacaatcatttgacgtaatacacgtgatttgattttaattaataaatcattgttaaatacatctttatcaatcttatataatgaaaaataattgtcatcatctaaaaaagtagggattaatgtaggttctgaataatgttcataaaagtataaccatgtcggaattttctcatgatacatcacataaggataactggaattgatatcaatagaaaaacaaggctcatcaataagtttgtttatgtatttagtgttatacatatttaaaccaccacgataaaatgatttgatataatcataaaaattcatatcatggaaatgataatgtgtatatgatattttaatatcttgatattgattgagtaactgaaaacgcgtcatttgattatttaaatacgattccataatattcaatgaaaatgttaatttgttatagtcaaaatttggaaatatatcactataatgaatatggcacatacctaatataataacgtcattatgaatgtatgtaagttgttcaggtgtgagtttagcaaaacactttacggcatagtcataggcttcactatctgacatgtcgttatctttatcaaatatcgtgtaattaaaatctgttttaagttggtcgtctgttaaataaccaccgtcaagcaactttttacctaatgttgcaattgatgtatttgttttcataaagttatcaataatattaaatttaaatccatttaaaaacattgttaagtctaaattaatagacgatttcacacgtttttctaaaatcacattttgatttttagctaaaatagtagcctcttgcatctttagtgtgtgttcgttttcttctgcagattttaaatatatattttcacgtgtgatattatcaaaataacgcatggtatctttaagtaaaaaatggttgtcatacttattacagttatgtgcaatcatgataatatctgtttttgacttagtgattgtatcacgtcgtttcacatacgtataaaatgcgtcataaaacgattcaaaactaggaaatacttctacatcaatctcataaccattaaaccaaccaattgctactgaatacgttacgtttttatatttggttggtttttttcgtccgttaactttattgtacgctaatgtttctatatcccagtataaaatcattcgacgttcatgtttatgatattgcatgcattctagtaatcccataatcttacacaccttttataagccgtattgtttcattaaatacttctttgtattttcaatatagttatcttcatatattttttcttttctttcaaattcactcatatttttcttcatttcattttttatatgaaattttataattttattcatatctaaatataaatatctatcattatcaacaacgtaattttttgagtaagcgttatcaaaatgtaaattgcttggattgtaataataacgctccatgttttctttataaaacatatcttctcttaaataaataacattgtcatctatatctttgattttagtacaaaattcatattgttttgtataaggtataacaataatattagcattaaatgtatcaacattatacataatttttatatatttatcgtcagttttaatatagaaaaaatcaccgttttgattgatatgatttcttaaattatcatctgccaaattatattcgttaaattcaaactcgccagtagtcatagcgtcatcgtttgaattgaatgcccgtgtgttacgcttttcatttacgtaatcgtttcttcgcatttctaaaaaaatgtttttgtaaagtcgtgatgtgttcattttatgtttttgtaataagttatatatatttaaattggataatataggacttgaaaagttgactgcattacctagtaaaaacattttaggaaagccaatataatcaacattaccatggttacggtcgattgattcataaattgtttttaacttatcccactcgtcaattaaatagtcatcttcaagtgctaaaaattcatcatatataatgatagggtagtgttttaaaaagttagaatgatattttaaatcagttgcactattcaaatctgtaatcacaccgatttccttatcttgatagatgatagctaaatagtccctagcgcttctgaatgtgacacgcttagatttgaatagtgggtttttgtctatgatttcctcaataaaatcacgataagcgtcacgtaatgtataatgacgtgataataaagtaaatttaatatcaagttttatagctaaataaataaagaatgaaacatagttgaacgattttccgtcagaacggtttgaaatagatatgtaatagtctatatcatcattcatgagttcatcaactaattctatttgattatagttatctggtattttttttctgacatgattgacagcattttgataatctcttaccatgtctaaacgattttgtttcaccatgtttttgctccttataatagtttatgatgtcgtttacagtattaaaattactcttcaaatgttgcataatataaaaagttatacctcacatctttatcatcaatagtagtcactggtctgtctgatttaccaatttctttgtataaagtgtcaatttctttaatatatttatacatagaagaattattatttttagcttgtaattcatataaagcatatttatgttttttagcgtttttattattagattcatctttacggttatatatttcaagtatatagtttaattgttcatgtcttttacctcttaccaatgatacggcatttgcatatgacacgtttctttcttttggaaaatagggcaaatgtgcgaaatgtttccatgtgtctatgtacgcctcttgtaaatctttatcatcaaatttaaaattaacagtactaaaatcatttaaaaacaattctttttcctgctcttttcttgcgtctctttcttttttccatttatccatttcggacgtatgtctaaccattgctaacgacctccatataacccatatataaccactaaaaagataatgtagaatataatcaatgtagtaaataaaacaccaaatgacacacgtatatgcattgtcataagtattacaagtgtaattaaaaatgctaaaaggaaaataatagctatgtttaatatattagtcatgttctatcacgttcccgttattatatatcactttgttttgaaaaattattgttatattactttctattggtttctcgaaatattctaatacgtcatcaatagtacaatccataaaaacttcttttttatataatgggtttaaatgttctcgataaaaaacctcaagacaactaaaactatatgtacgaacatcaacgtcaatgtctaaagtaaataaatcattgtattttgtatcactatcatagtattcaatagaaatttcaccgtatctaacaaaaacaacacattttccacttagtgattcaaattttgttattttattcataaaacaatctctattatctaaaatataattaattaatttttttgtgtttaatattgttgtaatattcattttatatctccttaatgtattttacacaaagattatatgcaccttttttgtaaaagtttgcgtcaaaataactatatattaccttaactttatttattttttcgaattgttcaatttcatgttcatatgtttcattaattgatacattgtataataatacggcagtgtatattttttccattgtttagcacctcataaaaataggggataaatatcccctataaaattgtattaaaatgatactggaccaaagttgattgagtaacctttttgaccttttttgttttcatattcataaattgtaaattgcacttcaccagcattgataatgttaacaacgtcctcgtcttgacgcatgtctttaattaattcagttaagtgattcggtaagtttacgttatagtcgtcagtgacgataacaccttgttcaccgaattttgattctttgtttgtgaataatgctctaacgatatactcttttttcataccgtatttttctactaattctgatagtttaataaattctctttctttttcctcaaattcaaatctcgctaatgtgttttggtgtcttgataaaatatcttttacgtttgtcatttttatttctcctcttatttaaattatttgctttctggaattgaaatttgtagtaaatcattgtaataaacttgaattgttttcgttgtgcgtgtagtggataaaagtttgtgtgaattaggtaataaatcttttgcttgtgtttttgataaatgatactcatgaagtggaataaattcttcaacatattcatttttatcatctaaatagtgaagaatataacctttaattcgtaatgtaacaatatcatcaggtttcattattatatcactcctttctaaaaaacgtaaacgttatacgtttcataaaatcctttgtgcatattccattgttctattgggtcatcaccagcaatgtaagataaaatagattctggtttagtttcgttgtttagttcatcatttaagaattgaacaacagaactattatagtttaataatagttgttggcaagccgatactaagttaattgcattgtcgaaagtataagctggattccattgaataagtttattgaatagttgcaacatttcagtatatgcttgacctttttctgcaggtgcattatcaacattaaccattattatcactccttaaatcattgatttcattccttaattcatcaacgatttttttaggtgaattatggtctaattgttcaaaatcgtccttttcaagtacaaataatgttaattcataagttgatgtattacccataacaataactatattaccattttttaaaatgtaagtttgtaaaggttgtacattttccattttgttacctccttgatttgattacatacatagtatagcaaacgtttaaaagttttgtcaatggtttttcttaaaaagtttaaataatttaaaaatactatttaatagaagaaattagattttaaatacaaatcataattttgaataaaagtcaatagatacatatattttgtattttatgaatatgttataggtttgataagttggaaaagtagaagcacagtttttataagtttagtaaagaaatgataagttaatttataagttttgatttgtataatcgtttattttaaacggtggggaggtgtaa

SEQ ID NO: 100 - DNA, 18134 bp, Rosenblumvirus sp.
  source 1..18134: mol_type = genomic DNA
gaaaaagtttttgtaaaattacacctccccaccgtttaaaataaacgattatacaaatcaaaacttataaattaacttatcatttctttactaaacttataaaaactgtgcttctacttttccaacttatcaaacctataacatattcataaaatacaaaatatatgtatctattgacttttattcaaaattatgatttgtatttaaaatctaatttcttctattaaatagtatttttaaattatttaaactttttaagaaaaaccattgacaaaacttttaaacgtttgctatactatgtatgtaatcaaatcaaggaggtaacaaaatggaaaatgtacaacctttacaaacttacattttaaaaaatggtaatatagttattgttatgggtaatacatcaacttatgaattaacattatttgtacttgaaaaggacgattttgaacaattagaccataattcacctaaaaaaatcgttgatgaattaaggaatgaaatcaatgatttaaggagtgataataatggttaatgttgataatgcacctgcagaaaaaggtcaagcatatactgaaatgttgcaactattcaataaacttattcaatggaatccagcttatactttcgacaatgcaattaacttagtatcggcttgccaacaactattattaaactataatagttctgttgttcaattcttaaatgatgaactaaacaacgaaactaaaccagaatctattttatcttacattgctggtgatgacccaatagaacaatggaatatgcacaaaggattttatgaaacgtataacgtttacgttttttagaaaggagtgatataataatgaaacctgatgatattgttacattacgaattaaaggttatattcttcactatttagatgataaaaatgaatatgttgaagaatttattccacttcatgagtatcatttatcaaaaacacaagcaaaagatttattacctaattcacacaaacttttatccactacacgcacaacgaaaacaattcaagtttattacaatgatttactacaaatttcaattccagaaagcaaataatttaaataagaggagaaataaaaatgacaaacgtaaaagatattttatcaagacaccaaaacacattagcgagatttgaatttgaggaaaaagaaagagaatttattaaactatcagaattagtagaaaaatacggtatgaaaaaagagtatatcgttagagcattattcacaaacaaagaatcaaaattcggtgaacaaggtgttatcgtcactgacgactataacgtaaacttaccgaatcacttaactgaattaattaaagacatgcgtcaagacgaggacgttgttaacattatcaatgctggtgaagtgcaatttacaatttatgaatatgaaaacaaaaaaggtcaaaaaggttactcaatcaactttggtccagtatcattttaatacaattttataggggatatttatcccctatttttatgaggtgctaaacaatggaaaaaatatacactgccgtattattatacaatgtatcaattaatgaaacatatgaacatgaaattgaacaattcgaaaaaataaataaagttaaggtaatatatagttattttgacgcaaacttttacaaaaaaggtgcatataatctttgtgtaaaatacattaaggagatataaaatgaatattacaacaatattaaacacaaaaaaattaattaattatattttagataatagagattgttttatgaataaaataacaaaatttgaatcactaagtggaaaatgtgttgtttttgttagatacggtgaaatttctattgaatactatgatagtgatacaaaatacaatgatttatttactttagacattgacgttgatgttcgtacatatagttttagttgtcttgaggttttttatcgagaacatttaaacccattatataaaaaagaagtttttatggattgtactattgatgacgtattagaatatttcgagaaaccaatagaaagtaatataacaataatttttcaaaacaaagtgatatataataacgggaacgtgatagaacatgactaatatattaaacatagctattattttccttttagcatttttaattacacttgtaatacttatgacaatgcatatacgtgtgtcatttggtgttttatttactacattgattatattctacattatctttttagtggttatatatgggttatatggaggtcgttagcaatggttagacatacgtccgaaatggataaatggaaaaaagaaagagacgcaagaaaagagcaggaaaaagaattgtttttaaatgattttagtactgttaattttaaatttgatgataaagatttacaagaggcgtacatagacacatggaaacatttcgcacatttgccctattttccaaaagaaagaaacgtgtcatatgcaaatgccgtatcattggtaagaggtaaaagacatgaacaattaaactatatacttgaaatatataaccgtaaagatgaatctaataataaaaacgctaaaaaacataaatatgctttatatgaattacaagctaaaaataataattcttctatgtataaatatattaaagaaattgacactttatacaaagaaattggtaaatcagacagaccagtgactactattgatgataaagatgtgaggtataactttttatattatgcaacatttgaagagtaattttaatactgtaaacgacatcataaactattataaggagcaaaaacatggtgaaacaaaatcgtttagacatggtaagagattatcaaaatgctgtcaatcatgtcagaaaaaaaataccagataactataatcaaatagaattagttgatgaactcatgaatgatgatatagactattacatatctatttcaaaccgttctgacggaaaatcgttcaactatgtttcattctttatttatttagctataaaacttgatattaaatttactttattatcacgtcattatacattacgtgacgcttatcgtgattttattgaggaaatcatagacaaaaacccactattcaaatctaagcgtgtcacattcagaagcgctagggactatttagctatcatctatcaagataaggaaatcggtgtgattacagatttgaatagtgcaactgatttaaaatatcattctaactttttaaaacactaccctatcattatatatgatgaatttttagcacttgaagatgactatttaattgacgagtgggataagttaaaaacaatttatgaatcaatcgaccgtaaccatggtaatgttgattatattggctttcctaaaatgtttttactaggtaatgcagtcaacttttcaagtcctatattatccaatttaaatatatataacttattacaaaaacataaaatgaacacatcacgactttacaaaaacatttttttagaaatgcgaagaaacgattacgtaaatgaaaagcgtaacacacgggcattcaattcaaacgatgacgctatgactactggcgagtttgaatttaacgaatataatttggcagatgataatttaagaaatcatatcaatcaaaacggtgattttttctatattaaaactgacgataaatatataaaaattatgtataatgttgatacatttaatgctaatattattgttataccttatacaaaacaatatgaattttgtactaaaatcaaagatatagatgacaatgttatttatttaagagaagatatgttttataaagaaaacatggagcgttattattacaatccaagcaatttacattttgataacgcttactcaaaaaattacgttgttgataatgatagatatttatatttagatatgaataaaattataaaatttcatataaaaaatgaaatgaagaaaaatatgagtgaatttgaaagaaaagaaaaaatatatgaagataactatattgaaaatacaaagaagtatttaatgaaacaatacggcttataaaaggtgtgtaagattatgggattactagaatgcatgcaatatcataaacatgaacgtcgaatgattttatactgggatatagaaacattagcgtacaataaagttaacggacgaaaaaaaccaaccaaatataaaaacgtaacgtattcagtagcaattggttggtttaatggttatgagattgatgtagaagtatttcctagttttgaatcgttttatgacgcattttatacgtatgtgaaacgacgtgatacaatcactaagtcaaaaacagatattatcatgattgcacataactgtaataagtatgacaaccattttttacttaaagataccatgcgttattttgataatatcacacgtgaaaatatatatttaaaatctgcagaagaaaacgaacacacactaaagatgcaagaggctactattttagctaaaaatcaaaatgtgattttagaaaaacgtgtgaaatcgtctattaatttagacttaacaatgtttttaaatggatttaaatttaatattattgataactttatgaaaacaaatacatcaattgcaacattaggtaaaaagttgcttgacggtggttatttaacagacgaccaacttaaaacagattttaattacacgatatttgataaagataacgacatgtcagatagtgaagcctatgactatgccgtaaagtgttttgctaaactcacacctgaacaacttacatacattcataatgacgttattatattaggtatgtgccatattcattatagtgatatatttccaaattttgactataacaaattaacattttcattgaatattatggaatcgtatttaaataatcaaatgacgcgttttcagttactcaatcaatatcaagatattaaaatatcatatacacattatcatttccatgatatgaatttttatgattatatcaaatcattttatcgtggtggtttaaatatgtataacactaaatacataaacaaacttattgatgagccttgtttttctattgatatcaattccagttatccttatgtgatgtatcatgagaaaattccgacatggttatacttttatgaacattattcagaacctacattaatccctacttttttagatgatgacaattatttttcattatataagattgataaagatgtatttaacaatgatttattaattaaaatcaaatcacgtgtattacgtcaaatgattgtaaaatactataataatgataatgattacgttaatattaatacaaatacattaagaatgattcaagacattacgggtattgattgcacgcatatacgtgttaattcgtttgtgatatatgaatgtgaatactttcatgcacgtgatattatatttcaaaactattttattaaaacacaaggtaagttaaaaaacaaaatcaacatgacatcaccttacgactatcatattactgatgacatcaacgaacacccttactcaaatgaggaggttatgttgtctaaagttgtacttaacggattatatggcatacctgcattacgttcacattttaacttattccgtttagatgataacaacgaactatataatatcattaacggttacaaaaacactgaacgtaatatattattctctacatttgtcacatcacgttcattatataacttattggtacctttccaatacttaactgaaaatgaaattgacgacaattttatttattgcgatactgatagtttgtatatgaaatccgttgttaaacccttattgaaccccagtttattcgacccgatagccttaggtaaatgggatattgaaaacgaacagatagataagatgtttgtactgaatcataaaaaatatgcatatgaagtgaatggaaagattaaaattgcttctgctggtataccgaaaagcgcctttgatacaagcgtcgattttgaaacctttgtacgtgaacaattctttgacggtgtgataatagaaaacaataaaagtatctataacgaacagggtacgatatcgatttatccgtctaaaacagaaattgtatgcggtaatgtatatgatgaatattttactgatgaacttaatatgaaacgtgaatttatcttaaaagacgctagagaaaattttgaccatagtcaatttgatgatattctttatattgaaagtgacatcggttcattctcacttaatgacttatttccagttgtacgttcagtgcataataaatctaatttgcatatattaaaacgtgaacacgatgaattaaaaaaaggcaactgttaaataacagtcgcctttttcttttgatataacatgaaaaatgtgtacgaaaattgattatgttttgtattttatttactagcattactagcatgttttcattatagcatagttaattaagcaataccactgaagaatacaatattatcaccagcgttatgaggtacaccattaatcaatgtatataatacaacccgtgacggtgccacgtatggtgggacgttatagtttgctactaagaatgaaccatcgtcaaatactgctacaacgacacctgtgtgaccaatgccatatgctgttgcttgtaagtatggtggtttacttgaaaaaccataccctactgttggattatgtgttgtttttgcacctaactttttatatacgtaccacacacgttgaccgtttgttatttgaccgtcgtctgttggttgtcttttaccatgtaattgtgacatatatgcccatgttaattctgtacattgtcctgcattacccgtttgaggaaatatgttacctggtttgtacaagtattcttttttgaataaaggtacaccaattgcttttttatatttttctggtaactgtgcatacgtccagttaccaccaatgacgcgtccacttttaccatttggtttgactgacttaccactaattggtttatggtccccgtcatcatcagtagggtttgaactactatccccactatctacttgcacactatcaatcagtttttttaatgaatcaagtagcccaatcgtcattttaatatgatatgtgttgttaaatgttttttgtaatgtaaaataatcattactaaaaaatttatcactaccaatactgtgtacatcccattgtaatgcgtcttgtactttttttaataattcttgcatggcttgttttgctaaagcgagcagtgaactaccactgtcaccactactaccactgtcagacgaatcactaggtgaaccacctttaccgtctaatttaccaccccatgctaaaatagtatttgcaccgtctaaaaaaggattaccatagttttgtactttattatatgacgctttcaaacctaggggataatatgccgcccaagtagccgctgctgttaatggaatatacgcacgtccgattgtacctgctttcatatttttagcaaaatctgcattaccttttctttgtacgtcttgaggtacaaagtgaacgatgttacctgcgtcataccaagacggttgtcctgcttgttttgattgtgatactaattttcttgcaatgaatttagcgtctgttaaatagtcacctcgtgcagatgtatggttcaaccaacctaaaccagcgctatacccttcatttttttcatatacagcaaaaagagtaggtgacacacctatctcttttactgcttttaatacttgtctgattttactttcattaccacctagccatacattaaagcgtccatacccttttactttagggactaactggtctatcgttaaaccgaaatcatcattaatatacgaatgcgtaaatttatctatcttctcttggtcgttcattattatcacccttttcagaatcgtttttaattactcttaatttatctttaatttgttcaggcactaatacgtccatttcagcacaattttcaacaatagatagtccctcatttgcgatataatagaaaatcgtaatcatgagtaaaccaccttttaattgtaaaatctggtcaatgatgttagctaaaatgataatacagaatatcaataattttttagcaaaacctttcattgattttttagaccatagattattatttttaattgctttagcaaaaccagtaacaacatctataatcatcaaaacaaataaaaaatatagtaactttaaatcacctgcatatatgaacatatgaaatgcttctgtgtccgtaaatcttaattttacctcattcattttatacaccttctctaaatttattatttaacgggttctgtaacattggattacctgaaccgtcattatgccaaaatctcacaccagattctaaaattgcttttaattgttccattaacatagggtcaatgtcacgtatggtatacgtacctgtacattttaaatagttgcatacagtcatgctgttaataggttcaatgaatgtattatagtcatttacttcaaaaccaaacaacatataatatttttgtaaaaatgtaatttctttaggtgacggtacactaattttcatcgttaaaccgttaatgctatttgcaatttggaatgcgtttcccatttctgattctgtcacagatggtggttgtaaggctaaatctttatattctgcctgttgttgtttgtagaaattatattcttcattaaacttaccaaataaagcggttggacttaaattacttgctacacttacagcgtcataaaaacgtgattttgggtcactaccatttaatacattatctatacgacttgtgattaattgactttctgcattacgctgtctattggcttgttgtgattgtcctaaaattccgttattaattaatataggcacttgcgcaaaactattaaatgttatattggtatttaagaatgaacctgtatcaattaatatatctttatttttagcaagtatcggtctatcgttttcagcactgttataatcaactggatatactcgcacttcattatgataaccaatgatggattttgtacgtaacttaacacctgttttttgtgaaattttaccagcgtcaagtaacattgtgttaccgttccagtcataaaattcaatcgtcatgtactcattacgtatcatatgtttaaactcgtcttttttagacaacatcatctcttgaagctttgtgaaacttaatgataaatcgtttaaactccattcttttgattttccaccctgttttaatgtctttaatccagtaattttttcacttgtcttaacgtcctctaaatcttttgtattaataaaatctttaggtaacatttgaaccttttgaaagttttgtgtaatccatggatatgcactcattttatccataaagttaataaagtcaccatattccataacgtataagttgactggcgatgtgatattgtcatatatcgtacctttagacgtatctaagtttggctcttttttcgtaccaaatttctttgataaatcagcgcttgactggaataacactaaattttccaaatactgttgcatttggttatacacatagtttttatttgatacttttaacacatcatcattgttacgtaacatcggcaacatatagttatacgtacgctttgataagtgttgacgttcaatattaacgtttgaaagttgttctaatacattaccttgtgtatacgtcataatagtatcaatcacaaaatatatttttaccacaacatcattcacatattcgatttgattcacaaaagcgtaatagcgtctatcctcaaaatctgataaaaacgtcatgtagttaatcccttgtgcgtcatgccactgcatatcaacattgatttccattctatcacgtataaaattatacggttgtttggaatagtctaatgatttaaaatgacgaccgtttaaaaaataatcatcacgctctttattactattaaaatgaattgtattttgatagtctgtaaacggtgtgttatagaaaaatttaaaatttgttaattttctcatttttacctccataaaaaatagtcgtataaataatttatacgactattataacatttttattcaatgatttgtgtatctattgcaaaacgtttatctccatttgttaagtcactatcgctataatttgatgtaacaaaatgtaattcattattaaagtttaaatataatcttgtattcatcattttattatcaatcgcacattgtgtgtagtgatgtgttgattttaagtttgcgttaatcgtacctaatttaatatcaccgtttttcttaatcccttttaataccccttttaattgtatggttttaacaccattaattgttacaatacgatattgcggtgcgggataacccccgttgctatcacttgcaacaataccactttcaagttgcacatcttgccaacctgtatcattaaattgtaattttgcactgttaattttttgatcaaaattttgttcaatttctgatttagattgtgcaattttagtatctatatttaagttatccacttttgttgataaaacgcttatacttgattcgtttgttgatgttttttgttttaaatcactaatatcattatcatattttgataaatcaatatgaccgtttccgtcaacaactggtctgtcttttaattcttgaataactttttcaatttttgatattttatcattatttgtttttaaagtagcgatgtcagatttaattgaattaatatcctgtgtataatctttttggttaatactgtttaattttgtttctaactcttttatcttatcaaggttggtatttgctttgatgtcattaatggtttgttctaaactttcaagtttcccagaacttgaattttgttttaacttattaatatcctcttgtatttcttgaattgtgttgtcattgttttgtttagattttaataattcaatttgactttctatgtcttttattttatcaagattaacactttttttaacttcagctaattctctttttaatgcgtcaatgttttctgcaccagtatttgatttaattatattaatttcatttgtgtttcgtcctacactatctttagtagcgtttaaagattgtgtaagtgtttcatatttatcatcatactttaacattgatttttcaaattcatttaattgtgtttgatgttgttctaaactttcatttaatatgacatttttttcttttaatgaatcaatgtcttttttattactatcaatcattggttggaatttttttattttctctagaaatgttgatattttttctttgttatcattaattgcaatatcatgatgttctatttgaccactgtatttattaatcaatgtttttaaatcattataaaatgttaatttataataaccagtatcagtacggacataaatatgtccgtctgatgtactgattaagtcattttcttctgttaaaaaatctgctaacctgtctattgtttcaacttgtcttaaacttcttacgattctatcagccattgttcacacctcttatttgtatcgtttccaactaaactcaaagaaaaaacctaaaatacccattatgagaaaaccccccaaggaataccaacactataactattacccgttttaccgttccattttcttactggtaaataataacgtgtaccttgccagttgtaaccaatccatacatacccatctgataaacaaacttcgtcatatggtgtataaccatttggttggaaccaatatccattaggttcacttaatttaggactacctacacgtgcaaatattggtaaaaatccacatgtaaatgttgcattttcatttctgtaatatgtgccatattggttttgtttccattttccgaatgtgtttacttttgatgtttctaattcgttgctgttactagcagaaaatttaggtctaataaagtgtgttacaccgtcataataatgtgttcttattgttgctttttcccaaccgtcaaacccaccacctaaccagttttgctctaaacatgtataataatctaaattaccacttaacacacattgaatatgtccatattgtccatctgtatatacaccaacatcccctaattgtggtttaaagttcggtgtattttcatacaccattgctaaacctttaaagtcattattgattgcgtctttagcgttaccccacatacgaactttaccgtctgtaatgtaatatatataagcaacagctaagtcagcgcattgataaccaaatgctaaatcaaagtccacacctacaccctcatgcttatatatccattcttttgcttgttgttgtgatttcatgaaacattatcctttcttaacccaactatattgacgtttttttgtatctgcattaacgttactaaagaattctttatgttcggacacattagcctctaatgtttgtcttacttcaccgacagcgttaccacttgaaacacgtaaccatgcacccacttttttaatttcttctggtgcgtctctaaacaattccatttggttaccagtaatataatattcaccaggtgtcgtaacgtaagctatccagttattgtattgacttgcttctaaatactcttgatatggtgcgtctgttttgattgttgtccataaaccataatcccattttaatgtaaatacatcgagcgtcataccacgcatgattttaaccatttttcgaccagtagaaaaacgcgttaattcttgtactgtacctaatgtttgtgttgtagggtatacattgatgaaacaaccagcgtctataatttttttactaccattcattggcatatttttaagtttactagctgtaccaccgtcaatataatagaaccctgcttgtgttaagtcatttaagtcgtcaatatggtctggaattgataacgcacgtccatcgtcttttgttaatttatagttttgtgaacctctcgcacgtaatgcttcaaagtgttcatactcaccaagttgaaagaacccatataaattattgaatcgttttccaccaccgccattagtcatagcaagtaataacgatttacgttttgtttttggattggtataaatacaaataccctccggctctttaaagttatcacgtggaaaattaataccgtcttgatatgataatttaaacggataatcataaatcttttgaccagttgttaatgaatatttaccaatttgaacgtgtgaattaactgaactgttaccacttaaccagtataaatcatcaccatcaacggcaatcccttgcatccatcgattatcattgttttctgaattatcaatcgtcatttctttttctacattatcaatgtgattttttacgtcagctcttgaacgtacctgtattgtcccgtcaccgaatcttaaaacgattttgtcattttcttcatcaattaacggtgtaaacgtgtgtttgtttaaaagtgactgtggtgtataatctgttaaccctttagcctcttctaaatctaaaatataattatctttatatgcgacttgtaacagttttgctacaccgtcatgatgtaaccatattttcatttcaccgttagattgtctttctaaacctattgtagtaccgtgaccaccttgtacaatacgcatactagaaattaagtcaccgctaggcgttaatttattaatccaaaaaccttctgggttttgtgaatctgattgtgtagagtacatttgattcgtttctttatctatgtttatagattggttaacagcattacgaataccaccgaatcccataacaaactttggttcaagctcatttaattcaaaaccattaacaaaacggtcaatgtctttaattaagtctttaacttctgatttaaaatcattcatttgtttcatttctgcaactttaaataatgcaaatgcagatgtaagaccagtactatatttagtaaattcatcatgaataattttatctattgtaccgtcgtttaaccaacctctaaataagtctttcgcttggtctgggaatgctttcattaagtcgtcccaatttttgaaacgtttttttaattcattgtcatagtcccaaatacgacgtgctaatacttcaattagttttgataatcttgaaatataatcataatatgattttgaattggtattataatctgctctatcatcgtaaaacggtgtgtaacgttctctcgttttatatatttcgtctaaaaatggacgaatgtcgtcaaaatatttaaaatcgttttcattatatgccataattttccacctttaccaaatttgtaaaaaacattttttatcaaattcatttaaaattttctttcttaaatcgtatactttatcaatattatcaattaaatactgttttgaaaattgtgtacctttcgcattacctttttgattttgattacgttttgcgttttgattactttcgttacttgatttattcacagttttaccgttgtcaattgtattattatctgcaaatcgtaacgttgtgttatctacatcaatgttaacctcgctttgtggtaatgacgcataagcatttctgttcgctgtcatgccagttgaattgtctaaagatgttgcattttgatttgaggtttcatctgtattgtttgttgtatcttcattatgttctgtaaaaccttgtgattgtagatatttttcaacttcgcttgatgaataaaccacattcaaataatcctcatgtgtgatacatacagtaatcacttgcatgccaaaagcttcaactgtttgtctgttgatttctctatctaaaaagtgtattgtaaatgattttttaaaaagtaagtcagataagtcatctttaagtttaaaacctttaaacactttttcattaacgatggctaaaacgtctttgtcaaacttcaacattttttgcatgaattgaaattcatcatcataaaacgttaatttatcattatttacaaattcattaaaaccttttttaattaattctgatttaataaaatcaaataaagtcattgtatatctagccattgtattcactactttcatcattagacaatgtatctatcattgtgatttctgaagtaacttcatcgtcgtaatacggtttaatatctaaaccataacgttttgataagaatgtaatcggttcacgaccttttaaataaatattactatttgatgtggtaaaacctcggttgctttttgcctcttcgtccgaaacaccgctttccttatccactgctagtgagttaatacctaaatagttacttaattcactaattttattttggtattcgcgtttcatctcagttagtgctggaatcacactattactggttaaatctatgatatcatcatcggcgttaaacataggtgacattttaacaaatggtgcaccgttgtatatttccgatacaagttgattaactgactcatcattaatgtctgatttaaatattttgctaaattttgcttgcataattaatgagaatctagataaaacaacctcagataattcatcagtataatgttctataatttctatatcactattatattgaattggtttattttgcatgacaacaaagttaccactcatacagttatcatatattttatgaatctgtaagcattcatctggtattaaatagtctggaacaatgaaataaatatcatcttttgttaatcgtttttgaaattgaaagttaaagtttgatgaaaaatttggtgcttgattaaagtaagtattatttacgtaaccaagaatcataatttgttcatttcttgctttgccgaccactacattgatgttttgtcttaatgctgattctaattgaataaaatctataccaaccgtatcacgattggtatagttgatgagtagtggtaaaaattccaaataacgattaaacataagacgtttaaatctgttgcgatgttctacaactcttttgttgatttcttttgataattcaacctgtacacctttattatgtttagtcatttatagcacctctattattctgttcttggtgttacatcttggtcagtaattaaaattttattaaagaatgggctaatggctttaaatgaatagtaatgaatccagtgtgtgacttcatcaaattcaccattatagaatggttgttttaacataccttttgtgtaacgtttatatttaattgaattaatatccaaaataaacgcgtataaatctgattttggtttaatttcttcaacattatctttaaactctgatagttttgacacatcataagtgaatactgaaccaactggaattgtatcacctttatgagtttgataatcaccgtaagcacgtaagaaagctactgattcatcacttgatacgacaatatctttagtgactttgaaaacaccacctaggtcgtcaaaactgataacgtggtctgtaaagtcaatccctgctacttggaatgtgttcgcaatctttgtatctaaaagataagattttaagctatcagtcgttaaaataacaatatcttttaattttgaaactgttgtatattgtccgattgcaccacctgaagcacgatgaacttcattatatttagcgctgttgttttgtaagttaagaatagcttcaaaaactttacttgctaaatcttcttttgatgttgctttacgtacatttgattcagataattgattcaatgagtaatcaactaacattgcacgcatttctttttcttctaatacgttaatatcagaaattttctttttatagacacctaatgcataattagtagcgtctgctaatgtttggaaattgaaacgtgtgtcattgttatttaatgtaaatttttgtttcttcacaataccactaccatataacttagtagccatacgtggatagttacgtttcaacattagttcttcatttttagataagtccatgttaataggtactgtatccataattacatattcttcactgtattgacctataaagtcctgctctttagctaaccaattaaaacggttacctaatgcaatatcgattaataacgtttcattaatcttagggaataaaaatttatttacaaatgtttcaaacattgtattagaattatcccacttatcgccaaacgtccatgattttgaataagtatgattaaagtcttgtaatgcagatttagctgactttgcaactaatagtgctgtttcgttttttgtactcttttctgccatgatttattattcctcctcaacatcgccagtaaatgactgttttgaaagtgaatgaatttgtacaccataactatcttcacttttatttgtatcaattgacatattttcatttaattctgttcgtttatttaatcttgaatcttcatatgatgtacccatcatagaacgcatgttgttaccctcgtacatgtttaagttcctcctaatctaaatctaatttatcgacaagttcttcatctgaatagtctttatcattgttatctgtttcttttgattctggttgtggttgtggttgtggttgtggttgttgcatttgtgatgtttcaaaattagtaaatcgttgttctaatgaagcgatacgttgttctaaaacaactgggtctaattttgcacaatcttcatctgttgtagtaggttctaatttgttttcattttcttcttcgattgtttctactgttttatcttcagttgattcttcagttgattcttcagttgattctgaagtttcttcagttgattctgaagtttcttctttgtcgtctggttttacgatttcatcaaattctgtcattttgacacctccaaatattttataactaattatatcatagaatatttaaataagtaaattaaatttattttattttcaaatcataactttgaataaaagtcaatagatacataaattttgtatttaatgaatatgtaataggttagataagttggaaaagtagacgcacagtttttataagtttagtaaagaaatgatatgttaatttataagttttgatttgtataatcgtttattttaaacggtggggaggtgtaaatttacaat

SEQ ID NO: 101 - DNA, 18122 bp, Rosenblumvirus sp.
  source 1..18122: mol_type = genomic DNA
cctccccaccgtttaaaataaacgattatacaaatcaaaacttataaattaacttatcatttctttactaaacttataaaaactgtgcttctacttttccaacttatcaaacctataacatattcataaaatacaaaatatatgtatctattgacttttattcaaaattatgatttgtatttaaaatctaatttcttctattaaatagtatttttaaattatttaaactttttaagaaaaaccattgacaaaacttttaaacgtttgctatactatgtatgtaatcaaatcaaggaggtaacaaaatggaaaatgtacaacctttacaaacttacattttaaaaaatggtaatatagttattgttatgggtaatacatcaacttatgaattaacattatttgtacttgaaaaggacgattttgaacaattagaccataattcacctaaaaaaatcgttgatgaattaaggaatgaaatcaatgatttaaggagtgataataatggttaatgttgataatgcacctgcagaaaaaggtcaagcatatactgaaatgttgcaactattcaataaacttattcaatggaatccagcttatactttcgacaatgcaattaacttagtatcggcttgccaacaactattattaaactataatagttctgttgttcaattcttaaatgatgaactaaacaacgaaactaaaccagaatctattttatcttacattgctggtgatgacccaatagaacaatggaatatgcacaaaggattttatgaaacgtataacgtttacgttttttagaaaggagtgatataataatgaaacctgatgatattgttacattacgaattaaaggttatattcttcactatttagatgataaaaatgaatatgttgaagaatttattccacttcatgagtatcatttatcaaaaacacaagcaaaagatttattacctaattcacacaaacttttatccactacacgcacaacgaaaacaattcaagtttattacaatgatttactacaaatttcaattccagaaagcaaataatttaaataagaggagaaataaaaatgacaaacgtaaaagatattttatcaagacaccaaaacacattagcgagatttgaatttgaggaaaaagaaagagaatttattaaactatcagaattagtagaaaaatacggtatgaaaaaagagtatatcgttagagcattattcacaaacaaagaatcaaaattcggtgaacaaggtgttatcgtcactgacgactataacgtaaacttaccgaatcacttaactgaattaattaaagacatgcgtcaagacgaggacgttgttaacattatcaatgctggtgaagtgcaatttacaatttatgaatatgaaaacaaaaaaggtcaaaaaggttactcaatcaactttggtccagtatcattttaatacaattttataggggatatttatcccctatttttatgaggtgctaaacaatggaaaaaatatacactgccgtattattatacaatgtatcaattaatgaaacatatgaacatgaaattgaacaattcgaaaaaataaataaagttaaggtaatatatagttattttgacgcaaacttttacaaaaaaggtgcatataatctttgtgtaaaatacattaaggagatataaaatgaatattacaacaatattaaacacaaaaaaattaattaattatattttagataatagagattgttttatgaataaaataacaaaatttgaatcactaagtggaaaatgtgttgtttttgttagatacggtgaaatttctattgaatactatgatagtgatacaaaatacaatgatttatttactttagacattgacgttgatgttcgtacatatagttttagttgtcttgaggttttttatcgagaacatttaaacccattatataaaaaagaagtttttatggattgtactattgatgacgtattagaatatttcgagaaaccaatagaaagtaatataacaataatttttcaaaacaaagtgatatataataacgggaacgtgatagaacatgactaatatattaaacatagctattattttccttttagcatttttaattacacttgtaatacttatgacaatgcatatacgtgtgtcatttggtgttttatttactacattgattatattctacattatctttttagtggttatatatgggttatatggaggtcgttagcaatggttagacatacgtccgaaatggataaatggaaaaaagaaagagacgcaagaaaagagcaggaaaaagaattgtttttaaatgattttagtactgttaattttaaatttgatgataaagatttacaagaggcgtacatagacacatggaaacatttcgcacatttgccctattttccaaaagaaagaaacgtgtcatatgcaaatgccgtatcattggtaagaggtaaaagacatgaacaattaaactatatacttgaaatatataaccgtaaagatgaatctaataataaaaacgctaaaaaacataaatatgctttatatgaattacaagctaaaaataataattcttctatgtataaatatattaaagaaattgacactttatacaaagaaattggtaaatcagacagaccagtgactactattgatgataaagatgtgaggtataactttttatattatgcaacatttgaagagtaattttaatactgtaaacgacatcataaactattataaggagcaaaaacatggtgaaacaaaatcgtttagacatggtaagagattatcaaaatgctgtcaatcatgtcagaaaaaaaataccagataactataatcaaatagaattagttgatgaactcatgaatgatgatatagactattacatatctatttcaaaccgttctgacggaaaatcgttcaactatgtttcattctttatttatttagctataaaacttgatattaaatttactttattatcacgtcattatacattacgtgacgcttatcgtgattttattgaggaaatcatagacaaaaacccactattcaaatctaagcgtgtcacattcagaagcgctagggactatttagctatcatctatcaagataaggaaatcggtgtgattacagatttgaatagtgcaactgatttaaaatatcattctaactttttaaaacactaccctatcattatatatgatgaatttttagcacttgaagatgactatttaattgacgagtgggataagttaaaaacaatttatgaatcaatcgaccgtaaccatggtaatgttgattatattggctttcctaaaatgtttttactaggtaatgcagtcaacttttcaagtcctatattatccaatttaaatatatataacttattacaaaaacataaaatgaacacatcacgactttacaaaaacatttttttagaaatgcgaagaaacgattacgtaaatgaaaagcgtaacacacgggcattcaattcaaacgatgacgctatgactactggcgagtttgaatttaacgaatataatttggcagatgataatttaagaaatcatatcaatcaaaacggtgattttttctatattaaaactgacgataaatatataaaaattatgtataatgttgatacatttaatgctaatattattgttataccttatacaaaacaatatgaattttgtactaaaatcaaagatatagatgacaatgttatttatttaagagaagatatgttttataaagaaaacatggagcgttattattacaatccaagcaatttacattttgataacgcttactcaaaaaattacgttgttgataatgatagatatttatatttagatatgaataaaattataaaatttcatataaaaaatgaaatgaagaaaaatatgagtgaatttgaaagaaaagaaaaaatatatgaagataactatattgaaaatacaaagaagtatttaatgaaacaatacggcttataaaaggtgtgtaagattatgggattactagaatgcatgcaatatcataaacatgaacgtcgaatgattttatactgggatatagaaacattagcgtacaataaagttaacggacgaaaaaaaccaaccaaatataaaaacgtaacgtattcagtagcaattggttggtttaatggttatgagattgatgtagaagtatttcctagttttgaatcgttttatgacgcattttatacgtatgtgaaacgacgtgatacaatcactaagtcaaaaacagatattatcatgattgcacataactgtaataagtatgacaaccattttttacttaaagataccatgcgttattttgataatatcacacgtgaaaatatatatttaaaatctgcagaagaaaacgaacacacactaaagatgcaagaggctactattttagctaaaaatcaaaatgtgattttagaaaaacgtgtgaaatcgtctattaatttagacttaacaatgtttttaaatggatttaaatttaatattattgataactttatgaaaacaaatacatcaattgcaacattaggtaaaaagttgcttgacggtggttatttaacagacgaccaacttaaaacagattttaattacacgatatttgataaagataacgacatgtcagatagtgaagcctatgactatgccgtaaagtgttttgctaaactcacacctgaacaacttacatacattcataatgacgttattatattaggtatgtgccatattcattatagtgatatatttccaaattttgactataacaaattaacattttcattgaatattatggaatcgtatttaaataatcaaatgacgcgttttcagttactcaatcaatatcaagatattaaaatatcatatacacattatcatttccatgatatgaatttttatgattatatcaaatcattttatcgtggtggtttaaatatgtataacactaaatacataaacaaacttattgatgagccttgtttttctattgatatcaattccagttatccttatgtgatgtatcatgagaaaattccgacatggttatacttttatgaacattattcagaacctacattaatccctacttttttagatgatgacaattatttttcattatataagattgataaagatgtatttaacaatgatttattaattaaaatcaaatcacgtgtattacgtcaaatgattgtaaaatactataataatgataatgattacgttaatattaatacaaatacattaagaatgattcaagacattacgggtattgattgcacgcatatacgtgttaattcgtttgtgatatatgaatgtgaatactttcatgcacgtgatattatatttcaaaactattttattaaaacacaaggtaagttaaaaaacaaaatcaacatgacatcaccttacgactatcatattactgatgacatcaacgaacacccttactcaaatgaggaggttatgttgtctaaagttgtacttaacggattatatggcatacctgcattacgttcacattttaacttattccgtttagatgataacaacgaactatataatatcattaacggttacaaaaacactgaacgtaatatattattctctacatttgtcacatcacgttcattatataacttattggtacctttccaatacttaactgaaaatgaaattgacgacaattttatttattgcgatactgatagtttgtatatgaaatccgttgttaaacccttattgaaccccagtttattcgacccgatagccttaggtaaatgggatattgaaaacgaacagatagataagatgtttgtactgaatcataaaaaatatgcatatgaagtgaatggaaagattaaaattgcttctgctggtataccgaaaagcgcctttgatacaagcgtcgattttgaaacctttgtacgtgaacaattctttgacggtgtgataatagaaaacaataaaagtatctataacgaacagggtacgatatcgatttatccgtctaaaacagaaattgtatgcggtaatgtatatgatgaatattttactgatgaacttaatatgaaacgtgaatttatcttaaaagacgctagagaaaattttgaccatagtcaatttgatgatattctttatattgaaagtgacatcggttcattctcacttaatgacttatttccagttgtacgttcagtgcataataaatctaatttgcatatattaaaacgtgaacacgatgaattaaaaaaaggcaactgttaaataacagtcgcctttttcttttgatataacatgaaaaatgtgtacgaaaattgattatgttttgtattttatttactagcattactagcatgttttcattatagcatagttaattaagcaataccactgaagaatacaatattatcaccagcgttatgaggtacaccattaatcaatgtatataatacaacccgtgacggtgccacgtatggtgggacgttatagtttgctactaagaatgaaccatcgtcaaatactgctacaacgacacctgtgtgaccaatgccatatgctgttgcttgtaagtatggtggtttacttgaaaaaccataccctactgttggattatgtgttgtttttgcacctaactttttatatacgtaccacacacgttgaccgtttgttatttgaccgtcgtctgttggttgtcttttaccatgtaattgtgacatatatgcccatgttaattctgtacattgtcctgcattacccgtttgaggaaatatgttacctggtttgtacaagtattcttttttgaataaaggtacaccaattgcttttttatatttttctggtaactgtgcatacgtccagttaccaccaatgacgcgtccacttttaccatttggtttgactgacttaccactaattggtttatggtccccgtcatcatcagtagggtttgaactactatccccactatctacttgcacactatcaatcagtttttttaatgaatcaagtagcccaatcgtcattttaatatgatatgtgttgttaaatgttttttgtaatgtaaaataatcattactaaaaaatttatcactaccaatactgtgtacatcccattgtaatgcgtcttgtactttttttaataattcttgcatggcttgttttgctaaagcgagcagtgaactaccactgtcaccactactaccactgtcagacgaatcactaggtgaaccacctttaccgtctaatttaccaccccatgctaaaatagtatttgcaccgtctaaaaaaggattaccatagttttgtactttattatatgacgctttcaaacctaggggataatatgccgcccaagtagccgctgctgttaatggaatatacgcacgtccgattgtacctgctttcatatttttagcaaaatctgcattaccttttctttgtacgtcttgaggtacaaagtgaacgatgttacctgcgtcataccaagacggttgtcctgcttgttttgattgtgatactaattttcttgcaatgaatttagcgtctgttaaatagtcacctcgtgcagatgtatggttcaaccaacctaaaccagcgctatacccttcatttttttcatatacagcaaaaagagtaggtgacacacctatctcttttactgcttttaatacttgtctgattttactttcattaccacctagccatacattaaagcgtccatacccttttactttagggactaactggtctatcgttaaaccgaaatcatcattaatatacgaatgcgtaaatttatctatcttctcttggtcgttcattattatcacccttttcagaatcgtttttaattactcttaatttatctttaatttgttcaggcactaatacgtccatttcagcacaattttcaacaatagatagtccctcatttgcgatataatagaaaatcgtaatcatgagtaaaccaccttttaattgtaaaatctggtcaatgatgttagctaaaatgataatacagaatatcaataattttttagcaaaacctttcattgattttttagaccatagattattatttttaattgctttagcaaaaccagtaacaacatctataatcatcaaaacaaataaaaaatatagtaactttaaatcacctgcatatatgaacatatgaaatgcttctgtgtccgtaaatcttaattttacctcattcattttatacaccttctctaaatttattatttaacgggttctgtaacattggattacctgaaccgtcattatgccaaaatctcacaccagattctaaaattgcttttaattgttccattaacatagggtcaatgtcacgtatggtatacgtacctgtacattttaaatagttgcatacagtcatgctgttaataggttcaatgaatgtattatagtcatttacttcaaaaccaaacaacatataatatttttgtaaaaatgtaatttctttaggtgacggtacactaattttcatcgttaaaccgttaatgctatttgcaatttggaatgcgtttcccatttctgattctgtcacagatggtggttgtaaggctaaatctttatattctgcctgttgttgtttgtagaaattatattcttcattaaacttaccaaataaagcggttggacttaaattacttgctacacttacagcgtcataaaaacgtgattttgggtcactaccatttaatacattatctatacgacttgtgattaattgactttctgcattacgctgtctattggcttgttgtgattgtcctaaaattccgttattaattaatataggcacttgcgcaaaactattaaatgttatattggtatttaagaatgaacctgtatcaattaatatatctttatttttagcaagtatcggtctatcgttttcagcactgttataatcaactggatatactcgcacttcattatgataaccaatgatggattttgtacgtaacttaacacctgttttttgtgaaattttaccagcgtcaagtaacattgtgttaccgttccagtcataaaattcaatcgtcatgtactcattacgtatcatatgtttaaactcgtcttttttagacaacatcatctcttgaagctttgtgaaacttaatgataaatcgtttaaactccattcttttgattttccaccctgttttaatgtctttaatccagtaattttttcacttgtcttaacgtcctctaaatcttttgtattaataaaatctttaggtaacatttgaaccttttgaaagttttgtgtaatccatggatatgcactcattttatccataaagttaataaagtcaccatattccataacgtataagttgactggcgatgtgatattgtcatatatcgtacctttagacgtatctaagtttggctcttttttcgtaccaaatttctttgataaatcagcgcttgactggaataacactaaattttccaaatactgttgcatttggttatacacatagtttttatttgatacttttaacacatcatcattgttacgtaacatcggcaacatatagttatacgtacgctttgataagtgttgacgttcaatattaacgtttgaaagttgttctaatacattaccttgtgtatacgtcataatagtatcaatcacaaaatatatttttaccacaacatcattcacatattcgatttgattcacaaaagcgtaatagcgtctatcctcaaaatctgataaaaacgtcatgtagttaatcccttgtgcgtcatgccactgcatatcaacattgatttccattctatcacgtataaaattatacggttgtttggaatagtctaatgatttaaaatgacgaccgtttaaaaaataatcatcacgctctttattactattaaaatgaattgtattttgatagtctgtaaacggtgtgttatagaaaaatttaaaatttgttaattttctcatttttacctccataaaaaatagtcgtataaataatttatacgactattataacatttttattcaatgatttgtgtatctattgcaaaacgtttatctccatttgttaagtcactatcgctataatttgatgtaacaaaatgtaattcattattaaagtttaaatataatcttgtattcatcattttattatcaatcgcacattgtgtgtagtgatgtgttgattttaagtttgcgttaatcgtacctaatttaatatcaccgtttttcttaatcccttttaataccccttttaattgtatggttttaacaccattaattgttacaatacgatattgcggtgcgggataacccccgttgctatcacttgcaacaataccactttcaagttgcacatcttgccaacctgtatcattaaattgtaattttgcactgttaattttttgatcaaaattttgttcaatttctgatttagattgtgcaattttagtatctatatttaagttatccacttttgttgataaaacgcttatacttgattcgtttgttgatgttttttgttttaaatcactaatatcattatcatattttgataaatcaatatgaccgtttccgtcaacaactggtctgtcttttaattcttgaataactttttcaatttttgatattttatcattatttgtttttaaagtagcgatgtcagatttaattgaattaatatcctgtgtataatctttttggttaatactgtttaattttgtttctaactcttttatcttatcaaggttggtatttgctttgatgtcattaatggtttgttctaaactttcaagtttcccagaacttgaattttgttttaacttattaatatcctcttgtatttcttgaattgtgttgtcattgttttgtttagattttaataattcaatttgactttctatgtcttttattttatcaagattaacactttttttaacttcagctaattctctttttaatgcgtcaatgttttctgcaccagtatttgatttaattatattaatttcatttgtgtttcgtcctacactatctttagtagcgtttaaagattgtgtaagtgtttcatatttatcatcatactttaacattgatttttcaaattcatttaattgtgtttgatgttgttctaaactttcatttaatatgacatttttttcttttaatgaatcaatgtcttttttattactatcaatcattggttggaatttttttattttctctagaaatgttgatattttttctttgttatcattaattgcaatatcatgatgttctatttgaccactgtatttattaatcaatgtttttaaatcattataaaatgttaatttataataaccagtatcagtacggacataaatatgtccgtctgatgtactgattaagtcattttcttctgttaaaaaatctgctaacctgtctattgtttcaacttgtcttaaacttcttacgattctatcagccattgttcacacctcttatttgtatcgtttccaactaaactcaaagaaaaaacctaaaatacccattatgagaaaaccccccaaggaataccaacactataactattacccgttttaccgttccattttcttactggtaaataataacgtgtaccttgccagttgtaaccaatccatacatacccatctgataaacaaacttcgtcatatggtgtataaccatttggttggaaccaatatccattaggttcacttaatttaggactacctacacgtgcaaatattggtaaaaatccacatgtaaatgttgcattttcatttctgtaatatgtgccatattggttttgtttccattttccgaatgtgtttacttttgatgtttctaattcgttgctgttactagcagaaaatttaggtctaataaagtgtgttacaccgtcataataatgtgttcttattgttgctttttcccaaccgtcaaacccaccacctaaccagttttgctctaaacatgtataataatctaaattaccacttaacacacattgaatatgtccatattgtccatctgtatatacaccaacatcccctaattgtggtttaaagttcggtgtattttcatacaccattgctaaacctttaaagtcattattgattgcgtctttagcgttaccccacatacgaactttaccgtctgtaatgtaatatatataagcaacagctaagtcagcgcattgataaccaaatgctaaatcaaagtccacacctacaccctcatgcttatatatccattcttttgcttgttgttgtgatttcatgaaacattatcctttcttaacccaactatattgacgtttttttgtatctgcattaacgttactaaagaattctttatgttcggacacattagcctctaatgtttgtcttacttcaccgacagcgttaccacttgaaacacgtaaccatgcacccacttttttaatttcttctggtgcgtctctaaacaattccatttggttaccagtaatataatattcaccaggtgtcgtaacgtaagctatccagttattgtattgacttgcttctaaatactcttgatatggtgcgtctgttttgattgttgtccataaaccataatcccattttaatgtaaatacatcgagcgtcataccacgcatgattttaaccatttttcgaccagtagaaaaacgcgttaattcttgtactgtacctaatgtttgtgttgtagggtatacattgatgaaacaaccagcgtctataatttttttactaccattcattggcatatttttaagtttactagctgtaccaccgtcaatataatagaaccctgcttgtgttaagtcatttaagtcgtcaatatggtctggaattgataacgcacgtccatcgtcttttgttaatttatagttttgtgaacctctcgcacgtaatgcttcaaagtgttcatactcaccaagttgaaagaacccatataaattattgaatcgttttccaccaccgccattagtcatagcaagtaataacgatttacgttttgtttttggattggtataaatacaaataccctccggctctttaaagttatcacgtggaaaattaataccgtcttgatatgataatttaaacggataatcataaatcttttgaccagttgttaatgaatatttaccaatttgaacgtgtgaattaactgaactgttaccacttaaccagtataaatcatcaccatcaacggcaatcccttgcatccatcgattatcattgttttctgaattatcaatcgtcatttctttttctacattatcaatgtgattttttacgtcagctcttgaacgtacctgtattgtcccgtcaccgaatcttaaaacgattttgtcattttcttcatcaattaacggtgtaaacgtgtgtttgtttaaaagtgactgtggtgtataatctgttaaccctttagcctcttctaaatctaaaatataattatctttatatgcgacttgtaacagttttgctacaccgtcatgatgtaaccatattttcatttcaccgttagattgtctttctaaacctattgtagtaccgtgaccaccttgtacaatacgcatactagaaattaagtcaccgctaggcgttaatttattaatccaaaaaccttctgggttttgtgaatctgattgtgtagagtacatttgattcgtttctttatctatgtttatagattggttaacagcattacgaataccaccgaatcccataacaaactttggttcaagctcatttaattcaaaaccattaacaaaacggtcaatgtctttaattaagtctttaacttctgatttaaaatcattcatttgtttcatttctgcaactttaaataatgcaaatgcagatgtaagaccagtactatatttagtaaattcatcatgaataattttatctattgtaccgtcgtttaaccaacctctaaataagtctttcgcttggtctgggaatgctttcattaagtcgtcccaatttttgaaacgtttttttaattcattgtcatagtcccaaatacgacgtgctaatacttcaattagttttgataatcttgaaatataatcataatatgattttgaattggtattataatctgctctatcatcgtaaaacggtgtgtaacgttctctcgttttatatatttcgtctaaaaatggacgaatgtcgtcaaaatatttaaaatcgttttcattatatgccataattttccacctttaccaaatttgtaaaaaacattttttatcaaattcatttaaaattttctttcttaaatcgtatactttatcaatattatcaattaaatactgttttgaaaattgtgtacctttcgcattacctttttgattttgattacgttttgcgttttgattactttcgttacttgatttattcacagttttaccgttgtcaattgtattattatctgcaaatcgtaacgttgtgttatctacatcaatgttaacctcgctttgtggtaatgacgcataagcatttctgttcgctgtcatgccagttgaattgtctaaagatgttgcattttgatttgaggtttcatctgtattgtttgttgtatcttcattatgttctgtaaaaccttgtgattgtagatatttttcaacttcgcttgatgaataaaccacattcaaataatcctcatgtgtgatacatacagtaatcacttgcatgccaaaagcttcaactgtttgtctgttgatttctctatctaaaaagtgtattgtaaatgattttttaaaaagtaagtcagataagtcatctttaagtttaaaacctttaaacactttttcattaacgatggctaaaacgtctttgtcaaacttcaacattttttgcatgaattgaaattcatcatcataaaacgttaatttatcattatttacaaattcattaaaaccttttttaattaattctgatttaataaaatcaaataaagtcattgtatatctagccattgtattcactactttcatcattagacaatgtatctatcattgtgatttctgaagtaacttcatcgtcgtaatacggtttaatatctaaaccataacgttttgataagaatgtaatcggttcacgaccttttaaataaatattactatttgatgtggtaaaacctcggttgctttttgcctcttcgtccgaaacaccgctttccttatccactgctagtgagttaatacctaaatagttacttaattcactaattttattttggtattcgcgtttcatctcagttagtgctggaatcacactattactggttaaatctatgatatcatcatcggcgttaaacataggtgacattttaacaaatggtgcaccgttgtatatttccgatacaagttgattaactgactcatcattaatgtctgatttaaatattttgctaaattttgcttgcataattaatgagaatctagataaaacaacctcagataattcatcagtataatgttctataatttctatatcactattatattgaattggtttattttgcatgacaacaaagttaccactcatacagttatcatatattttatgaatctgtaagcattcatctggtattaaatagtctggaacaatgaaataaatatcatcttttgttaatcgtttttgaaattgaaagttaaagtttgatgaaaaatttggtgcttgattaaagtaagtattatttacgtaaccaagaatcataatttgttcatttcttgctttgccgaccactacattgatgttttgtcttaatgctgattctaattgaataaaatctataccaaccgtatcacgattggtatagttgatgagtagtggtaaaaattccaaataacgattaaacataagacgtttaaatctgttgcgatgttctacaactcttttgttgatttcttttgataattcaacctgtacacctttattatgtttagtcatttatagcacctctattattctgttcttggtgttacatcttggtcagtaattaaaattttattaaagaatgggctaatggctttaaatgaatagtaatgaatccagtgtgtgacttcatcaaattcaccattatagaatggttgttttaacataccttttgtgtaacgtttatatttaattgaattaatatccaaaataaacgcgtataaatctgattttggtttaatttcttcaacattatctttaaactctgatagttttgacacatcataagtgaatactgaaccaactggaattgtatcacctttatgagtttgataatcaccgtaagcacgtaagaaagctactgattcatcacttgatacgacaatatctttagtgactttgaaaacaccacctaggtcgtcaaaactgataacgtggtctgtaaagtcaatccctgctacttggaatgtgttcgcaatctttgtatctaaaagataagattttaagctatcagtcgttaaaataacaatatcttttaattttgaaactgttgtatattgtccgattgcaccacctgaagcacgatgaacttcattatatttagcgctgttgttttgtaagttaagaatagcttcaaaaactttacttgctaaatcttcttttgatgttgctttacgtacatttgattcagataattgattcaatgagtaatcaactaacattgcacgcatttctttttcttctaatacgttaatatcagaaattttctttttatagacacctaatgcataattagtagcgtctgctaatgtttggaaattgaaacgtgtgtcattgttatttaatgtaaatttttgtttcttcacaataccactaccatataacttagtagccatacgtggatagttacgtttcaacattagttcttcatttttagataagtccatgttaataggtactgtatccataattacatattcttcactgtattgacctataaagtcctgctctttagctaaccaattaaaacggttacctaatgcaatatcgattaataacgtttcattaatcttagggaataaaaatttatttacaaatgtttcaaacattgtattagaattatcccacttatcgccaaacgtccatgattttgaataagtatgattaaagtcttgtaatgcagatttagctgactttgcaactaatagtgctgtttcgttttttgtactcttttctgccatgatttattattcctcctcaacatcgccagtaaatgactgttttgaaagtgaatgaatttgtacaccataactatcttcacttttatttgtatcaattgacatattttcatttaattctgttcgtttatttaatcttgaatcttcatatgatgtacccatcatagaacgcatgttgttaccctcgtacatgtttaagttcctcctaatctaaatctaatttatcgacaagttcttcatctgaatagtctttatcattgttatctgtttcttttgattctggttgtggttgtggttgtggttgtggttgttgcatttgtgatgtttcaaaattagtaaatcgttgttctaatgaagcgatacgttgttctaaaacaactgggtctaattttgcacaatcttcatctgttgtagtaggttctaatttgttttcattttcttcttcgattgtttctactgttttatcttcagttgattcttcagttgattcttcagttgattctgaagtttcttcagttgattctgaagtttcttctttgtcgtctggttttacgatttcatcaaattctgtcattttgacacctccaaatattttataactaattatatcatagaatatttaaataagtaaattaaatttattttattttcaaatcataactttgaataaaagtcaatagatacataaattttgtatttaatgaatatgtaataggttagataagttggaaaagtagacgcacagtttttataagtttagtaaagaaatgatatgttaatttataagttttgatttgtataatcgtttattttaaacggtggggaggtgtaaatttacaataactttttccc

SEQ ID NO: 102 - DNA, 18053 bp, Rosenblumvirus sp.
  source 1..18053: mol_type = genomic DNA
attgtaaatttacacctccccaccgtttaaaataaacgattatacaaatcaaaacttataaattaacatatcatttctttactaaacttataaaaactgtgcttctacttttccaacttatcaaacctataacatattcataaaatacaaaatatatgtatctattgacttttattcaaaattatgatttgtatttaaaatctaatttcttctattaaatagtatttttaaattatttaaactttttaagaaaaaccattgacaaaacttttaaacgtttgctatactatgtatgtaatcaaatcaaggaggtaacaaaatggaaaatgtacaacctttacaaacttacattttaaaaaatggtaatatagttattgttatgggtaatacatcaacttatgaattaacattatttgtacttgaaaaggacgattttgaacaattagaccataattcacctaaaaaaatcgttgatgaattaaggaatgaaatcaatgatttaaggagtgataataatggttaatgttgataatgcacctgcagaaaaaggtcaagcatatactgaaatgttgcaactattcaataaacttattcaatggaatccagcttatactttcgacaatgcaattaacttagtatcggcttgccaacaactattattaaactataatagttctgttgttcaattcttaaatgatgaactaaacaacgaaactaaaccagaatctattttatcttacattgctggtgatgacccaatagaacaatggaatatgcacaaaggattttatgaaacgtataacgtttacgttttttagaaaggagtgatataataatgaaacctgatgatattgttacattacgaattaaaggttatattcttcactatttagatgataaaaatgaatatgttgaagaatttattccacttcatgagtatcatttatcaaaaacacaagcaaaagatttattacctaattcacacaaacttttatccactacacgcacaacgaaaacaattcaagtttattacaatgatttactacaaatttcaattccagaaagcaaataatttaaataagaggagaaataaaaatgacaaacgtaaaagatattttatcaagacaccaaaacacattagcgagatttgaatttgaggaaaaagaaagagaatttattaaactatcagaattagtagaaaaatacggtatgaaaaaagagtatatcgttagagcattattcacaaacaaagaatcaaaattcggtgaacaaggtgttatcgtcactgacgactataacgtaaacttaccgaatcacttaactgaattaattaaagacatgcgtcaagacgaggacgttgttaacattatcaatgctggtgaagtgcaatttacaatttatgaatatgaaaacaaaaaaggtcaaaaaggttactcaatcaactttggtccagtatcattttaatacaattttataggggatatttatcccctatttttatgaggtgctaaacaatggaaaaaatatacactgccgtattattatacaatgtatcaattaatgaaacatatgaacatgaaattgaacaattcgaaaaaataaataaagttaaggtaatatatagttattttgacgcaaacttttacaaaaaaggtgcatataatctttgtgtaaaatacattaaggagatataaaatgaatattacaacaatattaaacacaaaaaaattaattaattatattttagataatagagattgttttatgaataaaataacaaaatttgaatcactaagtggaaaatgtgttgtttttgttagatacggtgaaatttctattgaatactatgatagtgatacaaaatacaatgatttatttactttagacattgacgttgatgttcgtacatatagttttagttgtcttgaggttttttatcgagaacatttaaacccattatataaaaaagaagtttttatggattgtactattgatgacgtattagaatatttcgagaaaccaatagaaagtaatataacaataatttttcaaaacaaagtgatatataataacgggaacgtgatagaacatgactaatatattaaacatagctattattttccttttagcatttttaattacacttgtaatacttatgacaatgcatatacgtgtgtcatttggtgttttatttactacattgattatattctacattatctttttagtggttatatatgggttatatggaggtcgttagcaatggttagacatacgtccgaaatggataaatggaaaaaagaaagagacgcaagaaaagagcaggaaaaagaattgtttttaaatgattttagtactgttaattttaaatttgatgataaagatttacaagaggcgtacatagacacatggaaacatttcgcacatttgccctattttccaaaagaaagaaacgtgtcatatgcaaatgccgtatcattggtaagaggtaaaagacatgaacaattaaactatatacttgaaatatataaccgtaaagatgaatctaataataaaaacgctaaaaaacataaatatgctttatatgaattacaagctaaaaataataattcttctatgtataaatatattaaagaaattgacactttatacaaagaaattggtaaatcagacagaccagtgactactattgatgataaagatgtgaggtataactttttatattatgcaacatttgaagagtaattttaatactgtaaacgacatcataaactattataaggagcaaaaacatggtgaaacaaaatcgtttagacatggtaagagattatcaaaatgctgtcaatcatgtcagaaaaaaaataccagataactataatcaaatagaattagttgatgaactcatgaatgatgatatagactattacatatctatttcaaaccgttctgacggaaaatcgttcaactatgtttcattctttatttatttagctataaaacttgatattaaatttactttattatcacgtcattatacattacgtgacgcttatcgtgattttattgaggaaatcatagacaaaaacccactattcaaatctaagcgtgtcacattcagaagcgctagggactatttagctatcatctatcaagataaggaaatcggtgtgattacagatttgaatagtgcaactgatttaaaatatcattctaactttttaaaacactaccctatcattatatatgatgaatttttagcacttgaagatgactatttaattgacgagtgggataagttaaaaacaatttatgaatcaatcgaccgtaaccatggtaatgttgattatattggctttcctaaaatgtttttactaggtaatgcagtcaacttttcaagtcctatattatccaatttaaatatatataacttattacaaaaacataaaatgaacacatcacgactttacaaaaacatttttttagaaatgcgaagaaacgattacgtaaatgaaaagcgtaacacacgggcattcaattcaaacgatgacgctatgactactggcgagtttgaatttaacgaatataatttggcagatgataatttaagaaatcatatcaatcaaaacggtgattttttctatattaaaactgacgataaatatataaaaattatgtataatgttgatacatttaatgctaatattattgttataccttatacaaaacaatatgaattttgtactaaaatcaaagatatagatgacaatgttatttatttaagagaagatatgttttataaagaaaacatggagcgttattattacaatccaagcaatttacattttgataacgcttactcaaaaaattacgttgttgataatgatagatatttatatttagatatgaataaaattataaaatttcatataaaaaatgaaatgaagaaaaatatgagtgaatttgaaagaaaagaaaaaatatatgaagataactatattgaaaatacaaagaagtatttaatgaaacaatacggcttataaaaggtgtgtaagattatgggattactagaatgcatgcaatatcataaacatgaacgtcgaatgattttatactgggatatagaaacattagcgtacaataaagttaacggacgaaaaaaaccaaccaaatataaaaacgtaacgtattcagtagcaattggttggtttaatggttatgagattgatgtagaagtatttcctagttttgaatcgttttatgacgcattttatacgtatgtgaaacgacgtgatacaatcactaagtcaaaaacagatattatcatgattgcacataactgtaataagtatgacaaccattttttacttaaagataccatgcgttattttgataatatcacacgtgaaaatatatatttaaaatctgcagaagaaaacgaacacacactaaagatgcaagaggctactattttagctaaaaatcaaaatgtgattttagaaaaacgtgtgaaatcgtctattaatttagacttaacaatgtttttaaatggatttaaatttaatattattgataactttatgaaaacaaatacatcaattgcaacattaggtaaaaagttgcttgacggtggttatttaacagacgaccaacttaaaacagattttaattacacgatatttgataaagataacgacatgtcagatagtgaagcctatgactatgccgtaaagtgttttgctaaactcacacctgaacaacttacatacattcataatgacgttattatattaggtatgtgccatattcattatagtgatatatttccaaattttgactataacaaattaacattttcattgaatattatggaatcgtatttaaataatcaaatgacgcgttttcagttactcaatcaatatcaagatattaaaatatcatatacacattatcatttccatgatatgaatttttatgattatatcaaatcattttatcgtggtggtttaaatatgtataacactaaatacataaacaaacttattgatgagccttgtttttctattgatatcaattccagttatccttatgtgatgtatcatgagaaaattccgacatggttatacttttatgaacattattcagaacctacattaatccctacttttttagatgatgacaattatttttcattatataagattgataaagatgtatttaacaatgatttattaattaaaatcaaatcacgtgtattacgtcaaatgattgtaaaatactataataatgataatgattacgttaatattaatacaaatacattaagaatgattcaagacattacgggtattgattgcacgcatatacgtgttaattcgtttgtgatatatgaatgtgaatactttcatgcacgtgatattatatttcaaaactattttattaaaacacaaggtaagttaaaaaacaaaatcaacatgacatcaccttacgactatcatattactgatgacatcaacgaacacccttactcaaatgaggaggttatgttgtctaaagttgtacttaacggattatatggcatacctgcattacgttcacattttaacttattccgtttagatgataacaacgaactatataatatcattaacggttacaaaaacactgaacgtaatatattattctctacatttgtcacatcacgttcattatataacttattggtacctttccaatacttaactgaaaatgaaattgacgacaattttatttattgcgatactgatagtttgtatatgaaatccgttgttaaacccttattgaaccccagtttattcgacccgatagccttaggtaaatgggatattgaaaacgaacagatagataagatgtttgtactgaatcataaaaaatatgcatatgaagtgaatggaaagattaaaattgcttctgctggtataccgaaaagcgcctttgatacaagcgtcgattttgaaacctttgtacgtgaacaattctttgacggtgtgataatagaaaacaataaaagtatctataacgaacagggtacgatatcgatttatccgtctaaaacagaaattgtatgcggtaatgtatatgatgaatattttactgatgaacttaatatgaaacgtgaatttatcttaaaagacgctagagaaaattttgaccatagtcaatttgatgatattctttatattgaaagtgacatcggttcattctcacttaatgacttatttccagttgtacgttcagtgcataataaatctaatttgcatatattaaaacgtgaacacgatgaattaaaaaaaggcaactgttaaataacagtcgcctttttcttttgatataacatgaaaaatgtgtacgaaaattgattatgttttgtattttatttactagcattactagcatgttttcattatagcatagttaattaagcaataccactgaagaatacaatattatcaccagcgttatgaggtacaccattaatcaatgtatataatacaacccgtgacggtgccacgtatggtgggacgttatagtttgctactaagaatgaaccatcgtcaaatactgctacaacgacacctgtgtgaccaatgccatatgctgttgcttgtaagtatggtggtttacttgaaaaaccataccctactgttggattatgtgttgtttttgcacctaactttttatatacgtaccacacacgttgaccgtttgttatttgaccgtcgtctgttggttgtcttttaccatgtaattgtgacatatatgcccatgttaattctgtacattgtcctgcattacccgtttgaggaaatatgttacctggtttgtacaagtattcttttttgaataaaggtacaccaattgcttttttatatttttctggtaactgtgcatacgtccagttaccaccaatgacgcgtccacttttaccatttggtttgactgacttaccactaattggtttatggtccccgtcatcatcagtagggtttgaactactatccccactatctacttgcacactatcaatcagtttttttaatgaatcaagtagcccaatcgtcattttaatatgatatgtgttgttaaatgttttttgtaatgtaaaataatcattactaaaaaatttatcactaccaatactgtgtacatcccattgtaatgcgtcttgtactttttttaataattcttgcatggcttgttttgctaaagcgagcagtgaactaccactgtcaccactactaccactgtcagacgaatcactaggtgaaccacctttaccgtctaatttaccaccccatgctaaaatagtatttgcaccgtctaaaaaaggattaccatagttttgtactttattatatgacgctttcaaacctaggggataatatgccgcccaagtagccgctgctgttaatggaatatacgcacgtccgattgtacctgctttcatatttttagcaaaatctgcattaccttttctttgtacgtcttgaggtacaaagtgaacgatgttacctgcgtcataccaagacggttgtcctgcttgttttgattgtgatactaattttcttgcaatgaatttagcgtctgttaaatagtcacctcgtgcagatgtatggttcaaccaacctaaaccagcgctatacccttcatttttttcatatacagcaaaaagagtaggtgacacacctatctcttttactgcttttaatacttgtctgattttactttcattaccacctagccatacattaaagcgtccatacccttttactttagggactaactggtctatcgttaaaccgaaatcatcattaatatacgaatgcgtaaatttatctatcttctcttggtcgttcattattatcacccttttcagaatcgtttttaattactcttaatttatctttaatttgttcaggcactaatacgtccatttcagcacaattttcaacaatagatagtccctcatttgcgatataatagaaaatcgtaatcatgagtaaaccaccttttaattgtaaaatctggtcaatgatgttagctaaaatgataatacagaatatcaataattttttagcaaaacctttcattgattttttagaccatagattattatttttaattgctttagcaaaaccagtaacaacatctataatcatcaaaacaaataaaaaatatagtaactttaaatcacctgcatatatgaacatatgaaatgcttctgtgtccgtaaatcttaattttacctcattcattttatacaccttctctaaatttattatttaacgggttctgtaacattggattacctgaaccgtcattatgccaaaatctcacaccagattctaaaattgcttttaattgttccattaacatagggtcaatgtcacgtatggtatacgtacctgtacattttaaatagttgcatacagtcatgctgttaataggttcaatgaatgtattatagtcatttacttcaaaaccaaacaacatataatatttttgtaaaaatgtaatttctttaggtgacggtacactaattttcatcgttaaaccgttaatgctatttgcaatttggaatgcgtttcccatttctgattctgtcacagatggtggttgtaaggctaaatctttatattctgcctgttgttgtttgtagaaattatattcttcattaaacttaccaaataaagcggttggacttaaattacttgctacacttacagcgtcataaaaacgtgattttgggtcactaccatttaatacattatctatacgacttgtgattaattgactttctgcattacgctgtctattggcttgttgtgattgtcctaaaattccgttattaattaatataggcacttgcgcaaaactattaaatgttatattggtatttaagaatgaacctgtatcaattaatatatctttatttttagcaagtatcggtctatcgttttcagcactgttataatcaactggatatactcgcacttcattatgataaccaatgatggattttgtacgtaacttaacacctgttttttgtgaaattttaccagcgtcaagtaacattgtgttaccgttccagtcataaaattcaatcgtcatgtactcattacgtatcatatgtttaaactcgtcttttttagacaacatcatctcttgaagctttgtgaaacttaatgataaatcgtttaaactccattcttttgattttccaccctgttttaatgtctttaatccagtaattttttcacttgtcttaacgtcctctaaatcttttgtattaataaaatctttaggtaacatttgaaccttttgaaagttttgtgtaatccatggatatgcactcattttatccataaagttaataaagtcaccatattccataacgtataagttgactggcgatgtgatattgtcatatatcgtacctttagacgtatctaagtttggctcttttttcgtaccaaatttctttgataaatcagcgcttgactggaataacactaaattttccaaatactgttgcatttggttatacacatagtttttatttgatacttttaacacatcatcattgttacgtaacatcggcaacatatagttatacgtacgctttgataagtgttgacgttcaatattaacgtttgaaagttgttctaatacattaccttgtgtatacgtcataatagtatcaatcacaaaatatatttttaccacaacatcattcacatattcgatttgattcacaaaagcgtaatagcgtctatcctcaaaatctgataaaaacgtcatgtagttaatcccttgtgcgtcatgccactgcatatcaacattgatttccattctatcacgtataaaattatacggttgtttggaatagtctaatgatttaaaatgacgaccgtttaaaaaataatcatcacgctctttattactattaaaatgaattgtattttgatagtctgtaaacggtgtgttatagaaaaatttaaaatttgttaattttctcatttttacctccataaaaaatagtcgtataaataatttatacgactattataacatttttattcaatgatttgtgtatctattgcaaaacgtttatctccatttgttaagtcactatcgctataatttgatgtaacaaaatgtaattcattattaaagtttaaatataatcttgtattcatcattttattatcaatcgcacattgtgtgtagtgatgtgttgattttaagtttgcgttaatcgtacctaatttaatatcaccgtttttcttaatcccttttaataccccttttaattgtatggttttaacaccattaattgttacaatacgatattgcggtgcgggataacccccgttgctatcacttgcaacaataccactttcaagttgcacatcttgccaacctgtatcattaaattgtaattttgcactgttaattttttgatcaaaattttgttcaatttctgatttagattgtgcaattttagtatctatatttaagttatccacttttgttgataaaacgcttatacttgattcgtttgttgatgttttttgttttaaatcactaatatcattatcatattttgataaatcaatatgaccgtttccgtcaacaactggtctgtcttttaattcttgaataactttttcaatttttgatattttatcattatttgtttttaaagtagcgatgtcagatttaattgaattaatatcctgtgtataatctttttggttaatactgtttaattttgtttctaactcttttatcttatcaaggttggtatttgctttgatgtcattaatggtttgttctaaactttcaagtttcccagaacttgaattttgttttaacttattaatatcctcttgtatttcttgaattgtgttgtcattgttttgtttagattttaataattcaatttgactttctatgtcttttattttatcaagattaacactttttttaacttcagctaattctctttttaatgcgtcaatgttttctgcaccagtatttgatttaattatattaatttcatttgtgtttcgtcctacactatctttagtagcgtttaaagattgtgtaagtgtttcatatttatcatcatactttaacattgatttttcaaattcatttaattgtgtttgatgttgttctaaactttcatttaatatgacatttttttcttttaatgaatcaatgtcttttttattactatcaatcattggttggaatttttttattttctctagaaatgttgatattttttctttgttatcattaattgcaatatcatgatgttctatttgaccactgtatttattaatcaatgtttttaaatcattataaaatgttaatttataataaccagtatcagtacggacataaatatgtccgtctgatgtactgattaagtcattttcttctgttaaaaaatctgctaacctgtctattgtttcaacttgtcttaaacttcttacgattctatcagccattgttcacacctcttatttgtatcgtttccaactaaactcaaagaaaaaacctaaaatacccattatgagaaaaccccccaaggaataccaacactataactattacccgttttaccgttccattttcttactggtaaataataacgtgtaccttgccagttgtaaccaatccatacatacccatctgataaacaaacttcgtcatatggtgtataaccatttggttggaaccaatatccattaggttcacttaatttaggactacctacacgtgcaaatattggtaaaaatccacatgtaaatgttgcattttcatttctgtaatatgtgccatattggttttgtttccattttccgaatgtgtttacttttgatgtttctaattcgttgctgttactagcagaaaatttaggtctaataaagtgtgttacaccgtcataataatgtgttcttattgttgctttttcccaaccgtcaaacccaccacctaaccagttttgctctaaacatgtataataatctaaattaccacttaacacacattgaatatgtccatattgtccatctgtatatacaccaacatcccctaattgtggtttaaagttcggtgtattttcatacaccattgctaaacctttaaagtcattattgattgcgtctttagcgttaccccacatacgaactttaccgtctgtaatgtaatatatataagcaacagctaagtcagcgcattgataaccaaatgctaaatcaaagtccacacctacaccctcatgcttatatatccattcttttgcttgttgttgtgatttcatgaaacattatcctttcttaacccaactatattgacgtttttttgtatctgcattaacgttactaaagaattctttatgttcggacacattagcctctaatgtttgtcttacttcaccgacagcgttaccacttgaaacacgtaaccatgcacccacttttttaatttcttctggtgcgtctctaaacaattccatttggttaccagtaatataatattcaccaggtgtcgtaacgtaagctatccagttattgtattgacttgcttctaaatactcttgatatggtgcgtctgttttgattgttgtccataaaccataatcccattttaatgtaaatacatcgagcgtcataccacgcatgattttaaccatttttcgaccagtagaaaaacgcgttaattcttgtactgtacctaatgtttgtgttgtagggtatacattgatgaaacaaccagcgtctataatttttttactaccattcattggcatatttttaagtttactagctgtaccaccgtcaatataatagaaccctgcttgtgttaagtcatttaagtcgtcaatatggtctggaattgataacgcacgtccatcgtcttttgttaatttatagttttgtgaacctctcgcacgtaatgcttcaaagtgttcatactcaccaagttgaaagaacccatataaattattgaatcgttttccaccaccgccattagtcatagcaagtaataacgatttacgttttgtttttggattggtataaatacaaataccctccggctctttaaagttatcacgtggaaaattaataccgtcttgatatgataatttaaacggataatcataaatcttttgaccagttgttaatgaatatttaccaatttgaacgtgtgaattaactgaactgttaccacttaaccagtataaatcatcaccatcaacggcaatcccttgcatccatcgattatcattgttttctgaattatcaatcgtcatttctttttctacattatcaatgtgattttttacgtcagctcttgaacgtacctgtattgtcccgtcaccgaatcttaaaacgattttgtcattttcttcatcaattaacggtgtaaacgtgtgtttgtttaaaagtgactgtggtgtataatctgttaaccctttagcctcttctaaatctaaaatataattatctttatatgcgacttgtaacagttttgctacaccgtcatgatgtaaccatattttcatttcaccgttagattgtctttctaaacctattgtagtaccgtgaccaccttgtacaatacgcatactagaaattaagtcaccgctaggcgttaatttattaatccaaaaaccttctgggttttgtgaatctgattgtgtagagtacatttgattcgtttctttatctatgtttatagattggttaacagcattacgaataccaccgaatcccataacaaactttggttcaagctcatttaattcaaaaccattaacaaaacggtcaatgtctttaattaagtctttaacttctgatttaaaatcattcatttgtttcatttctgcaactttaaataatgcaaatgcagatgtaagaccagtactatatttagtaaattcatcatgaataattttatctattgtaccgtcgtttaaccaacctctaaataagtctttcgcttggtctgggaatgctttcattaagtcgtcccaatttttgaaacgtttttttaattcattgtcatagtcccaaatacgacgtgctaatacttcaattagttttgataatcttgaaatataatcataatatgattttgaattggtattataatctgctctatcatcgtaaaacggtgtgtaacgttctctcgttttatatatttcgtctaaaaatggacgaatgtcgtcaaaatatttaaaatcgttttcattatatgccataattttccacctttaccaaatttgtaaaaaacattttttatcaaattcatttaaaattttctttcttaaatcgtatactttatcaatattatcaattaaatactgttttgaaaattgtgtacctttcgcattacctttttgattttgattacgttttgcgttttgattactttcgttacttgatttattcacagttttaccgttgtcaattgtattattatctgcaaatcgtaacgttgtgttatctacatcaatgttaacctcgctttgtggtaatgacgcataagcatttctgttcgctgtcatgccagttgaattgtctaaagatgttgcattttgatttgaggtttcatctgtattgtttgttgtatcttcattatgttctgtaaaaccttgtgattgtagatatttttcaacttcgcttgatgaataaaccacattcaaataatcctcatgtgtgatacatacagtaatcacttgcatgccaaaagcttcaactgtttgtctgttgatttctctatctaaaaagtgtattgtaaatgattttttaaaaagtaagtcagataagtcatctttaagtttaaaacctttaaacactttttcattaacgatggctaaaacgtctttgtcaaacttcaacattttttgcatgaattgaaattcatcatcataaaacgttaatttatcattatttacaaattcattaaaaccttttttaattaattctgatttaataaaatcaaataaagtcattgtatatctagccattgtattcactactttcatcattagacaatgtatctatcattgtgatttctgaagtaacttcatcgtcgtaatacggtttaatatctaaaccataacgttttgataagaatgtaatcggttcacgaccttttaaataaatattactatttgatgtggtaaaacctcggttgctttttgcctcttcgtccgaaacaccgctttccttatccactgctagtgagttaatacctaaatagttacttaattcactaattttattttggtattcgcgtttcatctcagttagtgctggaatcacactattactggttaaatctatgatatcatcatcggcgttaaacataggtgacattttaacaaatggtgcaccgttgtatatttccgatacaagttgattaactgactcatcattaatgtctgatttaaatattttgctaaattttgcttgcataattaatgagaatctagataaaacaacctcagataattcatcagtataatgttctataatttctatatcactattatattgaattggtttattttgcatgacaacaaagttaccactcatacagttatcatatattttatgaatctgtaagcattcatctggtattaaatagtctggaacaatgaaataaatatcatcttttgttaatcgtttttgaaattgaaagttaaagtttgatgaaaaatttggtgcttgattaaagtaagtattatttacgtaaccaagaatcataatttgttcatttcttgctttgccgaccactacattgatgttttgtcttaatgctgattctaattgaataaaatctataccaaccgtatcacgattggtatagttgatgagtagtggtaaaaattccaaataacgattaaacataagacgtttaaatctgttgcgatgttctacaactcttttgttgatttcttttgataattcaacctgtacacctttattatgtttagtcatttatagcacctctattattctgttcttggtgttacatcttggtcagtaattaaaattttattaaagaatgggctaatggctttaaatgaatagtaatgaatccagtgtgtgacttcatcaaattcaccattatagaatggttgttttaacataccttttgtgtaacgtttatatttaattgaattaatatccaaaataaacgcgtataaatctgattttggtttaatttcttcaacattatctttaaactctgatagttttgacacatcataagtgaatactgaaccaactggaattgtatcacctttatgagtttgataatcaccgtaagcacgtaagaaagctactgattcatcacttgatacgacaatatctttagtgactttgaaaacaccacctaggtcgtcaaaactgataacgtggtctgtaaagtcaatccctgctacttggaatgtgttcgcaatctttgtatctaaaagataagattttaagctatcagtcgttaaaataacaatatcttttaattttgaaactgttgtatattgtccgattgcaccacctgaagcacgatgaacttcattatatttagcgctgttgttttgtaagttaagaatagcttcaaaaactttacttgctaaatcttcttttgatgttgctttacgtacatttgattcagataattgattcaatgagtaatcaactaacattgcacgcatttctttttcttctaatacgttaatatcagaaattttctttttatagacacctaatgcataattagtagcgtctgctaatgtttggaaattgaaacgtgtgtcattgttatttaatgtaaatttttgtttcttcacaataccactaccatataacttagtagccatacgtggatagttacgtttcaacattagttcttcatttttagataagtccatgttaataggtactgtatccataattacatattcttcactgtattgacctataaagtcctgctctttagctaaccaattaaaacggttacctaatgcaatatcgattaataacgtttcattaatcttagggaataaaaatttatttacaaatgtttcaaacattgtattagaattatcccacttatcgccaaacgtccatgattttgaataagtatgattaaagtcttgtaatgcagatttagctgactttgcaactaatagtgctgtttcgttttttgtactcttttctgccatgatttattattcctcctcaacatcgccagtaaatgactgttttgaaagtgaatgaatttgtacaccataactatcttcacttttatttgtatcaattgacatattttcatttaattctgttcgtttatttaatcttgaatcttcatatgatgtacccatcatagaacgcatgttgttaccctcgtacatgtttaagttcctcctaatctaaatctaatttatcgacaagttcttcatctgaatagtctttatcattgttatctgtttcttttgattctggttgtggttgtggttgtggttgtggttgttgcatttgtgatgtttcaaaattagtaaatcgttgttctaatgaagcgatacgttgttctaaaacaactgggtctaattttgcacaatcttcatctgttgtagtaggttctaatttgttttcattttcttcttcgattgtttctactgttttatcttcagttgattcttcagttgattcttcagttgattctgaagtttcttcagttgattctgaagtttcttctttgtcgtctggttttacgatttcatcaaattctgtcattttgacacctccaaatattttataactaattatatcatagaatatttaaataagtaaattaaatttattttattttcaaatcataactttgaataaaagtcaatagatacataaattttgtatttaatgaatatgtaataggttagataagttggaaaagtagacgcacagtttttataagtttagtaaagaaat

SEQ ID NO: 103 - DNA, 18045 bp, Rosenblumvirus sp.
  source 1..18045: mol_type = genomic DNA
aattacacctccccaccgtttaaaataaacgattatacaaatcaaaacttataaattaacttatcatttctttactaaacttataaaaactgtgcttctacttttccaacttatcaaacctataacatattcataaaatacaaaatatatgtatctattgacttttattcaaaattatgatttgtatttaaaatctaatttcttctattaaatagtatttttaaattatttaaactttttaagaaaaaccattgacaaaacttttaaacgtttgctatactatgtatgtaatcaaatcaaggaggtaacaaaatggaaaatgtacaacctttacaaacttacattttaaaaaatggtaatatagttattgttatgggtaatacatcaacttatgaattaacattatttgtacttgaaaaggacgattttgaacaattagaccataattcacctaaaaaaatcgttgatgaattaaggaatgaaatcaatgatttaaggagtgataataatggttaatgttgataatgcacctgcagaaaaaggtcaagcatatactgaaatgttgcaactattcaataaacttattcaatggaatccagcttatactttcgacaatgcaattaacttagtatcggcttgccaacaactattattaaactataatagttctgttgttcaattcttaaatgatgaactaaacaacgaaactaaaccagaatctattttatcttacattgctggtgatgacccaatagaacaatggaatatgcacaaaggattttatgaaacgtataacgtttacgttttttagaaaggagtgatataataatgaaacctgatgatattgttacattacgaattaaaggttatattcttcactatttagatgataaaaatgaatatgttgaagaatttattccacttcatgagtatcatttatcaaaaacacaagcaaaagatttattacctaattcacacaaacttttatccactacacgcacaacgaaaacaattcaagtttattacaatgatttactacaaatttcaattccagaaagcaaataatttaaataagaggagaaataaaaatgacaaacgtaaaagatattttatcaagacaccaaaacacattagcgagatttgaatttgaggaaaaagaaagagaatttattaaactatcagaattagtagaaaaatacggtatgaaaaaagagtatatcgttagagcattattcacaaacaaagaatcaaaattcggtgaacaaggtgttatcgtcactgacgactataacgtaaacttaccgaatcacttaactgaattaattaaagacatgcgtcaagacgaggacgttgttaacattatcaatgctggtgaagtgcaatttacaatttatgaatatgaaaacaaaaaaggtcaaaaaggttactcaatcaactttggtccagtatcattttaatacaattttataggggatatttatcccctatttttatgaggtgctaaacaatggaaaaaatatacactgccgtattattatacaatgtatcaattaatgaaacatatgaacatgaaattgaacaattcgaaaaaataaataaagttaaggtaatatatagttattttgacgcaaacttttacaaaaaaggtgcatataatctttgtgtaaaatacattaaggagatataaaatgaatattacaacaatattaaacacaaaaaaattaattaattatattttagataatagagattgttttatgaataaaataacaaaatttgaatcactaagtggaaaatgtgttgtttttgttagatacggtgaaatttctattgaatactatgatagtgatacaaaatacaatgatttatttactttagacattgacgttgatgttcgtacatatagttttagttgtcttgaggttttttatcgagaacatttaaacccattatataaaaaagaagtttttatggattgtactattgatgacgtattagaatatttcgagaaaccaatagaaagtaatataacaataatttttcaaaacaaagtgatatataataacgggaacgtgatagaacatgactaatatattaaacatagctattattttccttttagcatttttaattacacttgtaatacttatgacaatgcatatacgtgtgtcatttggtgttttatttactacattgattatattctacattatctttttagtggttatatatgggttatatggaggtcgttagcaatggttagacatacgtccgaaatggataaatggaaaaaagaaagagacgcaagaaaagagcaggaaaaagaattgtttttaaatgattttagtactgttaattttaaatttgatgataaagatttacaagaggcgtacatagacacatggaaacatttcgcacatttgccctattttccaaaagaaagaaacgtgtcatatgcaaatgccgtatcattggtaagaggtaaaagacatgaacaattaaactatatacttgaaatatataaccgtaaagatgaatctaataataaaaacgctaaaaaacataaatatgctttatatgaattacaagctaaaaataataattcttctatgtataaatatattaaagaaattgacactttatacaaagaaattggtaaatcagacagaccagtgactactattgatgataaagatgtgaggtataactttttatattatgcaacatttgaagagtaattttaatactgtaaacgacatcataaactattataaggagcaaaaacatggtgaaacaaaatcgtttagacatggtaagagattatcaaaatgctgtcaatcatgtcagaaaaaaaataccagataactataatcaaatagaattagttgatgaactcatgaatgatgatatagactattacatatctatttcaaaccgttctgacggaaaatcgttcaactatgtttcattctttatttatttagctataaaacttgatattaaatttactttattatcacgtcattatacattacgtgacgcttatcgtgattttattgaggaaatcatagacaaaaacccactattcaaatctaagcgtgtcacattcagaagcgctagggactatttagctatcatctatcaagataaggaaatcggtgtgattacagatttgaatagtgcaactgatttaaaatatcattctaactttttaaaacactaccctatcattatatatgatgaatttttagcacttgaagatgactatttaattgacgagtgggataagttaaaaacaatttatgaatcaatcgaccgtaaccatggtaatgttgattatattggctttcctaaaatgtttttactaggtaatgcagtcaacttttcaagtcctatattatccaatttaaatatatataacttattacaaaaacataaaatgaacacatcacgactttacaaaaacatttttttagaaatgcgaagaaacgattacgtaaatgaaaagcgtaacacacgggcattcaattcaaacgatgacgctatgactactggcgagtttgaatttaacgaatataatttggcagatgataatttaagaaatcatatcaatcaaaacggtgattttttctatattaaaactgacgataaatatataaaaattatgtataatgttgatacatttaatgctaatattattgttataccttatacaaaacaatatgaattttgtactaaaatcaaagatatagatgacaatgttatttatttaagagaagatatgttttataaagaaaacatggagcgttattattacaatccaagcaatttacattttgataacgcttactcaaaaaattacgttgttgataatgatagatatttatatttagatatgaataaaattataaaatttcatataaaaaatgaaatgaagaaaaatatgagtgaatttgaaagaaaagaaaaaatatatgaagataactatattgaaaatacaaagaagtatttaatgaaacaatacggcttataaaaggtgtgtaagattatgggattactagaatgcatgcaatatcataaacatgaacgtcgaatgattttatactgggatatagaaacattagcgtacaataaagttaacggacgaaaaaaaccaaccaaatataaaaacgtaacgtattcagtagcaattggttggtttaatggttatgagattgatgtagaagtatttcctagttttgaatcgttttatgacgcattttatacgtatgtgaaacgacgtgatacaatcactaagtcaaaaacagatattatcatgattgcacataactgtaataagtatgacaaccattttttacttaaagataccatgcgttattttgataatatcacacgtgaaaatatatatttaaaatctgcagaagaaaacgaacacacactaaagatgcaagaggctactattttagctaaaaatcaaaatgtgattttagaaaaacgtgtgaaatcgtctattaatttagacttaacaatgtttttaaatggatttaaatttaatattattgataactttatgaaaacaaatacatcaattgcaacattaggtaaaaagttgcttgacggtggttatttaacagacgaccaacttaaaacagattttaattacacgatatttgataaagataacgacatgtcagatagtgaagcctatgactatgccgtaaagtgttttgctaaactcacacctgaacaacttacatacattcataatgacgttattatattaggtatgtgccatattcattatagtgatatatttccaaattttgactataacaaattaacattttcattgaatattatggaatcgtatttaaataatcaaatgacgcgttttcagttactcaatcaatatcaagatattaaaatatcatatacacattatcatttccatgatatgaatttttatgattatatcaaatcattttatcgtggtggtttaaatatgtataacactaaatacataaacaaacttattgatgagccttgtttttctattgatatcaattccagttatccttatgtgatgtatcatgagaaaattccgacatggttatacttttatgaacattattcagaacctacattaatccctacttttttagatgatgacaattatttttcattatataagattgataaagatgtatttaacaatgatttattaattaaaatcaaatcacgtgtattacgtcaaatgattgtaaaatactataataatgataatgattacgttaatattaatacaaatacattaagaatgattcaagacattacgggtattgattgcacgcatatacgtgttaattcgtttgtgatatatgaatgtgaatactttcatgcacgtgatattatatttcaaaactattttattaaaacacaaggtaagttaaaaaacaaaatcaacatgacatcaccttacgactatcatattactgatgacatcaacgaacacccttactcaaatgaggaggttatgttgtctaaagttgtacttaacggattatatggcatacctgcattacgttcacattttaacttattccgtttagatgataacaacgaactatataatatcattaacggttacaaaaacactgaacgtaatatattattctctacatttgtcacatcacgttcattatataacttattggtacctttccaatacttaactgaaaatgaaattgacgacaattttatttattgcgatactgatagtttgtatatgaaatccgttgttaaacccttattgaaccccagtttattcgacccgatagccttaggtaaatgggatattgaaaacgaacagatagataagatgtttgtactgaatcataaaaaatatgcatatgaagtgaatggaaagattaaaattgcttctgctggtataccgaaaagcgcctttgatacaagcgtcgattttgaaacctttgtacgtgaacaattctttgacggtgtgataatagaaaacaataaaagtatctataacgaacagggtacgatatcgatttatccgtctaaaacagaaattgtatgcggtaatgtatatgatgaatattttactgatgaacttaatatgaaacgtgaatttatcttaaaagacgctagagaaaattttgaccatagtcaatttgatgatattctttatattgaaagtgacatcggttcattctcacttaatgacttatttccagttgtacgttcagtgcataataaatctaatttgcatatattaaaacgtgaacacgatgaattaaaaaaaggcaactgttaaataacagtcgcctttttcttttgatataacatgaaaaatgtgtacgaaaattgattatgttttgtattttatttactagcattactagcatgttttcattatagcatagttaattaagcaataccactgaagaatacaatattatcaccagcgttatgaggtacaccattaatcaatgtatataatacaacccgtgacggtgccacgtatggtgggacgttatagtttgctactaagaatgaaccatcgtcaaatactgctacaacgacacctgtgtgaccaatgccatatgctgttgcttgtaagtatggtggtttacttgaaaaaccataccctactgttggattatgtgttgtttttgcacctaactttttatatacgtaccacacacgttgaccgtttgttatttgaccgtcgtctgttggttgtcttttaccatgtaattgtgacatatatgcccatgttaattctgtacattgtcctgcattacccgtttgaggaaatatgttacctggtttgtacaagtattcttttttgaataaaggtacaccaattgcttttttatatttttctggtaactgtgcatacgtccagttaccaccaatgacgcgtccacttttaccatttggtttgactgacttaccactaattggtttatggtccccgtcatcatcagtagggtttgaactactatccccactatctacttgcacactatcaatcagtttttttaatgaatcaagtagcccaatcgtcattttaatatgatatgtgttgttaaatgttttttgtaatgtaaaataatcattactaaaaaatttatcactaccaatactgtgtacatcccattgtaatgcgtcttgtactttttttaataattcttgcatggcttgttttgctaaagcgagcagtgaactaccactgtcaccactactaccactgtcagacgaatcactaggtgaaccacctttaccgtctaatttaccaccccatgctaaaatagtatttgcaccgtctaaaaaaggattaccatagttttgtactttattatatgacgctttcaaacctaggggataatatgccgcccaagtagccgctgctgttaatggaatatacgcacgtccgattgtacctgctttcatatttttagcaaaatctgcattaccttttctttgtacgtcttgaggtacaaagtgaacgatgttacctgcgtcataccaagacggttgtcctgcttgttttgattgtgatactaattttcttgcaatgaatttagcgtctgttaaatagtcacctcgtgcagatgtatggttcaaccaacctaaaccagcgctatacccttcatttttttcatatacagcaaaaagagtaggtgacacacctatctcttttactgcttttaatacttgtctgattttactttcattaccacctagccatacattaaagcgtccatacccttttactttagggactaactggtctatcgttaaaccgaaatcatcattaatatacgaatgcgtaaatttatctatcttctcttggtcgttcattattatcacccttttcagaatcgtttttaattactcttaatttatctttaatttgttcaggcactaatacgtccatttcagcacaattttcaacaatagatagtccctcatttgcgatataatagaaaatcgtaatcatgagtaaaccaccttttaattgtaaaatctggtcaatgatgttagctaaaatgataatacagaatatcaataattttttagcaaaacctttcattgattttttagaccatagattattatttttaattgctttagcaaaaccagtaacaacatctataatcatcaaaacaaataaaaaatatagtaactttaaatcacctgcatatatgaacatatgaaatgcttctgtgtccgtaaatcttaattttacctcattcattttatacaccttctctaaatttattatttaacgggttctgtaacattggattacctgaaccgtcattatgccaaaatctcacaccagattctaaaattgcttttaattgttccattaacatagggtcaatgtcacgtatggtatacgtacctgtacattttaaatagttgcatacagtcatgctgttaataggttcaatgaatgtattatagtcatttacttcaaaaccaaacaacatataatatttttgtaaaaatgtaatttctttaggtgacggtacactaattttcatcgttaaaccgttaatgctatttgcaatttggaatgcgtttcccatttctgattctgtcacagatggtggttgtaaggctaaatctttatattctgcctgttgttgtttgtagaaattatattcttcattaaacttaccaaataaagcggttggacttaaattacttgctacacttacagcgtcataaaaacgtgattttgggtcactaccatttaatacattatctatacgacttgtgattaattgactttctgcattacgctgtctattggcttgttgtgattgtcctaaaattccgttattaattaatataggcacttgcgcaaaactattaaatgttatattggtatttaagaatgaacctgtatcaattaatatatctttatttttagcaagtatcggtctatcgttttcagcactgttataatcaactggatatactcgcacttcattatgataaccaatgatggattttgtacgtaacttaacacctgttttttgtgaaattttaccagcgtcaagtaacattgtgttaccgttccagtcataaaattcaatcgtcatgtactcattacgtatcatatgtttaaactcgtcttttttagacaacatcatctcttgaagctttgtgaaacttaatgataaatcgtttaaactccattcttttgattttccaccctgttttaatgtctttaatccagtaattttttcacttgtcttaacgtcctctaaatcttttgtattaataaaatctttaggtaacatttgaaccttttgaaagttttgtgtaatccatggatatgcactcattttatccataaagttaataaagtcaccatattccataacgtataagttgactggcgatgtgatattgtcatatatcgtacctttagacgtatctaagtttggctcttttttcgtaccaaatttctttgataaatcagcgcttgactggaataacactaaattttccaaatactgttgcatttggttatacacatagtttttatttgatacttttaacacatcatcattgttacgtaacatcggcaacatatagttatacgtacgctttgataagtgttgacgttcaatattaacgtttgaaagttgttctaatacattaccttgtgtatacgtcataatagtatcaatcacaaaatatatttttaccacaacatcattcacatattcgatttgattcacaaaagcgtaatagcgtctatcctcaaaatctgataaaaacgtcatgtagttaatcccttgtgcgtcatgccactgcatatcaacattgatttccattctatcacgtataaaattatacggttgtttggaatagtctaatgatttaaaatgacgaccgtttaaaaaataatcatcacgctctttattactattaaaatgaattgtattttgatagtctgtaaacggtgtgttatagaaaaatttaaaatttgttaattttctcatttttacctccataaaaaatagtcgtataaataatttatacgactattataacatttttattcaatgatttgtgtatctattgcaaaacgtttatctccatttgttaagtcactatcgctataatttgatgtaacaaaatgtaattcattattaaagtttaaatataatcttgtattcatcattttattatcaatcgcacattgtgtgtagtgatgtgttgattttaagtttgcgttaatcgtacctaatttaatatcaccgtttttcttaatcccttttaataccccttttaattgtatggttttaacaccattaattgttacaatacgatattgcggtgcgggataacccccgttgctatcacttgcaacaataccactttcaagttgcacatcttgccaacctgtatcattaaattgtaattttgcactgttaattttttgatcaaaattttgttcaatttctgatttagattgtgcaattttagtatctatatttaagttatccacttttgttgataaaacgcttatacttgattcgtttgttgatgttttttgttttaaatcactaatatcattatcatattttgataaatcaatatgaccgtttccgtcaacaactggtctgtcttttaattcttgaataactttttcaatttttgatattttatcattatttgtttttaaagtagcgatgtcagatttaattgaattaatatcctgtgtataatctttttggttaatactgtttaattttgtttctaactcttttatcttatcaaggttggtatttgctttgatgtcattaatggtttgttctaaactttcaagtttcccagaacttgaattttgttttaacttattaatatcctcttgtatttcttgaattgtgttgtcattgttttgtttagattttaataattcaatttgactttctatgtcttttattttatcaagattaacactttttttaacttcagctaattctctttttaatgcgtcaatgttttctgcaccagtatttgatttaattatattaatttcatttgtgtttcgtcctacactatctttagtagcgtttaaagattgtgtaagtgtttcatatttatcatcatactttaacattgatttttcaaattcatttaattgtgtttgatgttgttctaaactttcatttaatatgacatttttttcttttaatgaatcaatgtcttttttattactatcaatcattggttggaatttttttattttctctagaaatgttgatattttttctttgttatcattaattgcaatatcatgatgttctatttgaccactgtatttattaatcaatgtttttaaatcattataaaatgttaatttataataaccagtatcagtacggacataaatatgtccgtctgatgtactgattaagtcattttcttctgttaaaaaatctgctaacctgtctattgtttcaacttgtcttaaacttcttacgattctatcagccattgttcacacctcttatttgtatcgtttccaactaaactcaaagaaaaaacctaaaatacccattatgagaaaaccccccaaggaataccaacactataactattacccgttttaccgttccattttcttactggtaaataataacgtgtaccttgccagttgtaaccaatccatacatacccatctgataaacaaacttcgtcatatggtgtataaccatttggttggaaccaatatccattaggttcacttaatttaggactacctacacgtgcaaatattggtaaaaatccacatgtaaatgttgcattttcatttctgtaatatgtgccatattggttttgtttccattttccgaatgtgtttacttttgatgtttctaattcgttgctgttactagcagaaaatttaggtctaataaagtgtgttacaccgtcataataatgtgttcttattgttgctttttcccaaccgtcaaacccaccacctaaccagttttgctctaaacatgtataataatctaaattaccacttaacacacattgaatatgtccatattgtccatctgtatatacaccaacatcccctaattgtggtttaaagttcggtgtattttcatacaccattgctaaacctttaaagtcattattgattgcgtctttagcgttaccccacatacgaactttaccgtctgtaatgtaatatatataagcaacagctaagtcagcgcattgataaccaaatgctaaatcaaagtccacacctacaccctcatgcttatatatccattcttttgcttgttgttgtgatttcatgaaacattatcctttcttaacccaactatattgacgtttttttgtatctgcattaacgttactaaagaattctttatgttcggacacattagcctctaatgtttgtcttacttcaccgacagcgttaccacttgaaacacgtaaccatgcacccacttttttaatttcttctggtgcgtctctaaacaattccatttggttaccagtaatataatattcaccaggtgtcgtaacgtaagctatccagttattgtattgacttgcttctaaatactcttgatatggtgcgtctgttttgattgttgtccataaaccataatcccattttaatgtaaatacatcgagcgtcataccacgcatgattttaaccatttttcgaccagtagaaaaacgcgttaattcttgtactgtacctaatgtttgtgttgtagggtatacattgatgaaacaaccagcgtctataatttttttactaccattcattggcatatttttaagtttactagctgtaccaccgtcaatataatagaaccctgcttgtgttaagtcatttaagtcgtcaatatggtctggaattgataacgcacgtccatcgtcttttgttaatttatagttttgtgaacctctcgcacgtaatgcttcaaagtgttcatactcaccaagttgaaagaacccatataaattattgaatcgttttccaccaccgccattagtcatagcaagtaataacgatttacgttttgtttttggattggtataaatacaaataccctccggctctttaaagttatcacgtggaaaattaataccgtcttgatatgataatttaaacggataatcataaatcttttgaccagttgttaatgaatatttaccaatttgaacgtgtgaattaactgaactgttaccacttaaccagtataaatcatcaccatcaacggcaatcccttgcatccatcgattatcattgttttctgaattatcaatcgtcatttctttttctacattatcaatgtgattttttacgtcagctcttgaacgtacctgtattgtcccgtcaccgaatcttaaaacgattttgtcattttcttcatcaattaacggtgtaaacgtgtgtttgtttaaaagtgactgtggtgtataatctgttaaccctttagcctcttctaaatctaaaatataattatctttatatgcgacttgtaacagttttgctacaccgtcatgatgtaaccatattttcatttcaccgttagattgtctttctaaacctattgtagtaccgtgaccaccttgtacaatacgcatactagaaattaagtcaccgctaggcgttaatttattaatccaaaaaccttctgggttttgtgaatctgattgtgtagagtacatttgattcgtttctttatctatgtttatagattggttaacagcattacgaataccaccgaatcccataacaaactttggttcaagctcatttaattcaaaaccattaacaaaacggtcaatgtctttaattaagtctttaacttctgatttaaaatcattcatttgtttcatttctgcaactttaaataatgcaaatgcagatgtaagaccagtactatatttagtaaattcatcatgaataattttatctattgtaccgtcgtttaaccaacctctaaataagtctttcgcttggtctgggaatgctttcattaagtcgtcccaatttttgaaacgtttttttaattcattgtcatagtcccaaatacgacgtgctaatacttcaattagttttgataatcttgaaatataatcataatatgattttgaattggtattataatctgctctatcatcgtaaaacggtgtgtaacgttctctcgttttatatatttcgtctaaaaatggacgaatgtcgtcaaaatatttaaaatcgttttcattatatgccataattttccacctttaccaaatttgtaaaaaacattttttatcaaattcatttaaaattttctttcttaaatcgtatactttatcaatattatcaattaaatactgttttgaaaattgtgtacctttcgcattacctttttgattttgattacgttttgcgttttgattactttcgttacttgatttattcacagttttaccgttgtcaattgtattattatctgcaaatcgtaacgttgtgttatctacatcaatgttaacctcgctttgtggtaatgacgcataagcatttctgttcgctgtcatgccagttgaattgtctaaagatgttgcattttgatttgaggtttcatctgtattgtttgttgtatcttcattatgttctgtaaaaccttgtgattgtagatatttttcaacttcgcttgatgaataaaccacattcaaataatcctcatgtgtgatacatacagtaatcacttgcatgccaaaagcttcaactgtttgtctgttgatttctctatctaaaaagtgtattgtaaatgattttttaaaaagtaagtcagataagtcatctttaagtttaaaacctttaaacactttttcattaacgatggctaaaacgtctttgtcaaacttcaacattttttgcatgaattgaaattcatcatcataaaacgttaatttatcattatttacaaattcattaaaaccttttttaattaattctgatttaataaaatcaaataaagtcattgtatatctagccattgtattcactactttcatcattagacaatgtatctatcattgtgatttctgaagtaacttcatcgtcgtaatacggtttaatatctaaaccataacgttttgataagaatgtaatcggttcacgaccttttaaataaatattactatttgatgtggtaaaacctcggttgctttttgcctcttcgtccgaaacaccgctttccttatccactgctagtgagttaatacctaaatagttacttaattcactaattttattttggtattcgcgtttcatctcagttagtgctggaatcacactattactggttaaatctatgatatcatcatcggcgttaaacataggtgacattttaacaaatggtgcaccgttgtatatttccgatacaagttgattaactgactcatcattaatgtctgatttaaatattttgctaaattttgcttgcataattaatgagaatctagataaaacaacctcagataattcatcagtataatgttctataatttctatatcactattatattgaattggtttattttgcatgacaacaaagttaccactcatacagttatcatatattttatgaatctgtaagcattcatctggtattaaatagtctggaacaatgaaataaatatcatcttttgttaatcgtttttgaaattgaaagttaaagtttgatgaaaaatttggtgcttgattaaagtaagtattatttacgtaaccaagaatcataatttgttcatttcttgctttgccgaccactacattgatgttttgtcttaatgctgattctaattgaataaaatctataccaaccgtatcacgattggtatagttgatgagtagtggtaaaaattccaaataacgattaaacataagacgtttaaatctgttgcgatgttctacaactcttttgttgatttcttttgataattcaacctgtacacctttattatgtttagtcatttatagcacctctattattctgttcttggtgttacatcttggtcagtaattaaaattttattaaagaatgggctaatggctttaaatgaatagtaatgaatccagtgtgtgacttcatcaaattcaccattatagaatggttgttttaacataccttttgtgtaacgtttatatttaattgaattaatatccaaaataaacgcgtataaatctgattttggtttaatttcttcaacattatctttaaactctgatagttttgacacatcataagtgaatactgaaccaactggaattgtatcacctttatgagtttgataatcaccgtaagcacgtaagaaagctactgattcatcacttgatacgacaatatctttagtgactttgaaaacaccacctaggtcgtcaaaactgataacgtggtctgtaaagtcaatccctgctacttggaatgtgttcgcaatctttgtatctaaaagataagattttaagctatcagtcgttaaaataacaatatcttttaattttgaaactgttgtatattgtccgattgcaccacctgaagcacgatgaacttcattatatttagcgctgttgttttgtaagttaagaatagcttcaaaaactttacttgctaaatcttcttttgatgttgctttacgtacatttgattcagataattgattcaatgagtaatcaactaacattgcacgcatttctttttcttctaatacgttaatatcagaaattttctttttatagacacctaatgcataattagtagcgtctgctaatgtttggaaattgaaacgtgtgtcattgttatttaatgtaaatttttgtttcttcacaataccactaccatataacttagtagccatacgtggatagttacgtttcaacattagttcttcatttttagataagtccatgttaataggtactgtatccataattacatattcttcactgtattgacctataaagtcctgctctttagctaaccaattaaaacggttacctaatgcaatatcgattaataacgtttcattaatcttagggaataaaaatttatttacaaatgtttcaaacattgtattagaattatcccacttatcgccaaacgtccatgattttgaataagtatgattaaagtcttgtaatgcagatttagctgactttgcaactaatagtgctgtttcgttttttgtactcttttctgccatgatttattattcctcctcaacatcgccagtaaatgactgttttgaaagtgaatgaatttgtacaccataactatcttcacttttatttgtatcaattgacatattttcatttaattctgttcgtttatttaatcttgaatcttcatatgatgtacccatcatagaacgcatgttgttaccctcgtacatgtttaagttcctcctaatctaaatctaatttatcgacaagttcttcatctgaatagtctttatcattgttatctgtttcttttgattctggttgtggttgtggttgtggttgtggttgttgcatttgtgatgtttcaaaattagtaaatcgttgttctaatgaagcgatacgttgttctaaaacaactgggtctaattttgcacaatcttcatctgttgtagtaggttctaatttgttttcattttcttcttcgattgtttctactgttttatcttcagttgattcttcagttgattcttcagttgattctgaagtttcttcagttgattctgaagtttcttctttgtcgtctggttttacgatttcatcaaattctgtcattttgacacctccaaatattttataactaattatatcatagaatatttaaataagtaaattaaatttattttattttcaaatcataactttgaataaaagtcaatagatacataaattttgtatttaatgaatatgtaataggttagataagttggaaaagtagacgcacagtttttataagtttagtaaagaaa

SEQ ID NO: 104 - DNA, 18130 bp, Rosenblumvirus sp.
  source 1..18130: mol_type = genomic DNA
gggaaaaagttattgtaaatttacacctccccaccgtttaaaataaacgattatacaaatcaaaacttataaattaacatatcatttctttactaaacttataaaaactgtgcgtctacttttccaacttatctaacctattacatattcattaaatacaaaatttatgtatctattgacttttattcaaagttatgatttgaaaataaaataaatttaatttacttatttaaatattctatgatataattagttataaaatatttggaggtgtcaaaatgacagaatttgatgaaatcgtaaaaccagacgacaaagaagaaacttcagaatcaactgaagaaacttcagaatcaactgaagaatcaactgaagaatcaactgaagataaaacagtagaaacaatcgaagaagaaaatgaaaacaaattagaacctactacaacagatgaagattgtgcaaaattagacccagttgttttagaacaacgtatcgcttcattagaacaacgatttactaattttgaaacatcacaaatgcaacaaccacaaccacaaccacaaccacaaccagaatcaaaagaaacagataacaatgataaagactattcagatgaagaacttgtcgataaattagatttagattaggaggaacttaaacatgtacgagggtaacaacatgcgttctatgatgggtacatcatatgaagattcaagattaaataaacgaacagaattaaatgaaaatatgtcaattgatacaaataaaagtgaagatagttatggtgtacaaattcattcactttcaaaacagtcatttactggcgatgttgaggaggaataataaatcatggcagaaaagagtacaaaaaacgaaacagcactattagttgcaaagtcagctaaatctgcattacaagactttaatcatacttattcaaaatcatggacgtttggcgataagtgggataattctaatacaatgtttgaaacatttgtaaataaatttttattccctaagattaatgaaacgttattaatcgatattgcattaggtaaccgttttaattggttagctaaagagcaggactttataggtcaatacagtgaagaatatgtaattatggatacagtacctattaacatggacttatctaaaaatgaagaactaatgttgaaacgtaactatccacgtatggctactaagttatatggtagtggtattgtgaagaaacaaaaatttacattaaataacaatgacacacgtttcaatttccaaacattagcagacgctactaattatgcattaggtgtctataaaaagaaaatttctgatattaacgtattagaagaaaaagaaatgcgtgcaatgttagttgattactcattgaatcaattatctgaatcaaatgtacgtaaagcaacatcaaaagaagatttagcaagtaaagtttttgaagctattcttaacttacaaaacaacagcgctaaatataatgaagttcatcgtgcttcaggtggtgcaatcggacaatatacaacagtttcaaaattaaaagatattgttattttaacgactgatagcttaaaatcttatcttttagatacaaagattgcgaacacattccaagtagcagggattgactttacagaccacgttatcagttttgacgacctaggtggtgttttcaaagtcactaaagatattgtcgtatcaagtgatgaatcagtagctttcttacgtgcttacggtgattatcaaactcataaaggtgatacaattccagttggttcagtattcacttatgatgtgtcaaaactatcagagtttaaagataatgttgaagaaattaaaccaaaatcagatttatacgcgtttattttggatattaattcaattaaatataaacgttacacaaaaggtatgttaaaacaaccattctataatggtgaatttgatgaagtcacacactggattcattactattcatttaaagccattagcccattctttaataaaattttaattactgaccaagatgtaacaccaagaacagaataatagaggtgctataaatgactaaacataataaaggtgtacaggttgaattatcaaaagaaatcaacaaaagagttgtagaacatcgcaacagatttaaacgtcttatgtttaatcgttatttggaatttttaccactactcatcaactataccaatcgtgatacggttggtatagattttattcaattagaatcagcattaagacaaaacatcaatgtagtggtcggcaaagcaagaaatgaacaaattatgattcttggttacgtaaataatacttactttaatcaagcaccaaatttttcatcaaactttaactttcaatttcaaaaacgattaacaaaagatgatatttatttcattgttccagactatttaataccagatgaatgcttacagattcataaaatatatgataactgtatgagtggtaactttgttgtcatgcaaaataaaccaattcaatataatagtgatatagaaattatagaacattatactgatgaattatctgaggttgttttatctagattctcattaattatgcaagcaaaatttagcaaaatatttaaatcagacattaatgatgagtcagttaatcaacttgtatcggaaatatacaacggtgcaccatttgttaaaatgtcacctatgtttaacgccgatgatgatatcatagatttaaccagtaatagtgtgattccagcactaactgagatgaaacgcgaataccaaaataaaattagtgaattaagtaactatttaggtattaactcactagcagtggataaggaaagcggtgtttcggacgaagaggcaaaaagcaaccgaggttttaccacatcaaatagtaatatttatttaaaaggtcgtgaaccgattacattcttatcaaaacgttatggtttagatattaaaccgtattacgacgatgaagttacttcagaaatcacaatgatagatacattgtctaatgatgaaagtagtgaatacaatggctagatatacaatgactttatttgattttattaaatcagaattaattaaaaaaggttttaatgaatttgtaaataatgataaattaacgttttatgatgatgaatttcaattcatgcaaaaaatgttgaagtttgacaaagacgttttagccatcgttaatgaaaaagtgtttaaaggttttaaacttaaagatgacttatctgacttactttttaaaaaatcatttacaatacactttttagatagagaaatcaacagacaaacagttgaagcttttggcatgcaagtgattactgtatgtatcacacatgaggattatttgaatgtggtttattcatcaagcgaagttgaaaaatatctacaatcacaaggttttacagaacataatgaagatacaacaaacaatacagatgaaacctcaaatcaaaatgcaacatctttagacaattcaactggcatgacagcgaacagaaatgcttatgcgtcattaccacaaagcgaggttaacattgatgtagataacacaacgttacgatttgcagataataatacaattgacaacggtaaaactgtgaataaatcaagtaacgaaagtaatcaaaacgcaaaacgtaatcaaaatcaaaaaggtaatgcgaaaggtacacaattttcaaaacagtatttaattgataatattgataaagtatacgatttaagaaagaaaattttaaatgaatttgataaaaaatgttttttacaaatttggtaaaggtggaaaattatggcatataatgaaaacgattttaaatattttgacgacattcgtccatttttagacgaaatatataaaacgagagaacgttacacaccgttttacgatgatagagcagattataataccaattcaaaatcatattatgattatatttcaagattatcaaaactaattgaagtattagcacgtcgtatttgggactatgacaatgaattaaaaaaacgtttcaaaaattgggacgacttaatgaaagcattcccagaccaagcgaaagacttatttagaggttggttaaacgacggtacaatagataaaattattcatgatgaatttactaaatatagtactggtcttacatctgcatttgcattatttaaagttgcagaaatgaaacaaatgaatgattttaaatcagaagttaaagacttaattaaagacattgaccgttttgttaatggttttgaattaaatgagcttgaaccaaagtttgttatgggattcggtggtattcgtaatgctgttaaccaatctataaacatagataaagaaacgaatcaaatgtactctacacaatcagattcacaaaacccagaaggtttttggattaataaattaacgcctagcggtgacttaatttctagtatgcgtattgtacaaggtggtcacggtactacaataggtttagaaagacaatctaacggtgaaatgaaaatatggttacatcatgacggtgtagcaaaactgttacaagtcgcatataaagataattatattttagatttagaagaggctaaagggttaacagattatacaccacagtcacttttaaacaaacacacgtttacaccgttaattgatgaagaaaatgacaaaatcgttttaagattcggtgacgggacaatacaggtacgttcaagagctgacgtaaaaaatcacattgataatgtagaaaaagaaatgacgattgataattcagaaaacaatgataatcgatggatgcaagggattgccgttgatggtgatgatttatactggttaagtggtaacagttcagttaattcacacgttcaaattggtaaatattcattaacaactggtcaaaagatttatgattatccgtttaaattatcatatcaagacggtattaattttccacgtgataactttaaagagccggagggtatttgtatttataccaatccaaaaacaaaacgtaaatcgttattacttgctatgactaatggcggtggtggaaaacgattcaataatttatatgggttctttcaacttggtgagtatgaacactttgaagcattacgtgcgagaggttcacaaaactataaattaacaaaagacgatggacgtgcgttatcaattccagaccatattgacgacttaaatgacttaacacaagcagggttctattatattgacggtggtacagctagtaaacttaaaaatatgccaatgaatggtagtaaaaaaattatagacgctggttgtttcatcaatgtataccctacaacacaaacattaggtacagtacaagaattaacgcgtttttctactggtcgaaaaatggttaaaatcatgcgtggtatgacgctcgatgtatttacattaaaatgggattatggtttatggacaacaatcaaaacagacgcaccatatcaagagtatttagaagcaagtcaatacaataactggatagcttacgttacgacacctggtgaatattatattactggtaaccaaatggaattgtttagagacgcaccagaagaaattaaaaaagtgggtgcatggttacgtgtttcaagtggtaacgctgtcggtgaagtaagacaaacattagaggctaatgtgtccgaacataaagaattctttagtaacgttaatgcagatacaaaaaaacgtcaatatagttgggttaagaaaggataatgtttcatgaaatcacaacaacaagcaaaagaatggatatataagcatgagggtgtaggtgtggactttgatttagcatttggttatcaatgcgctgacttagctgttgcttatatatattacattacagacggtaaagttcgtatgtggggtaacgctaaagacgcaatcaataatgactttaaaggtttagcaatggtgtatgaaaatacaccgaactttaaaccacaattaggggatgttggtgtatatacagatggacaatatggacatattcaatgtgtgttaagtggtaatttagattattatacatgtttagagcaaaactggttaggtggtgggtttgacggttgggaaaaagcaacaataagaacacattattatgacggtgtaacacactttattagacctaaattttctgctagtaacagcaacgaattagaaacatcaaaagtaaacacattcggaaaatggaaacaaaaccaatatggcacatattacagaaatgaaaatgcaacatttacatgtggatttttaccaatatttgcacgtgtaggtagtcctaaattaagtgaacctaatggatattggttccaaccaaatggttatacaccatatgacgaagtttgtttatcagatgggtatgtatggattggttacaactggcaaggtacacgttattatttaccagtaagaaaatggaacggtaaaacgggtaatagttatagtgttggtattccttggggggttttctcataatgggtattttaggttttttctttgagtttagttggaaacgatacaaataagaggtgtgaacaatggctgatagaatcgtaagaagtttaagacaagttgaaacaatagacaggttagcagattttttaacagaagaaaatgacttaatcagtacatcagacggacatatttatgtccgtactgatactggttattataaattaacattttataatgatttaaaaacattgattaataaatacagtggtcaaatagaacatcatgatattgcaattaatgataacaaagaaaaaatatcaacatttctagagaaaataaaaaaattccaaccaatgattgatagtaataaaaaagacattgattcattaaaagaaaaaaatgtcatattaaatgaaagtttagaacaacatcaaacacaattaaatgaatttgaaaaatcaatgttaaagtatgatgataaatatgaaacacttacacaatctttaaacgctactaaagatagtgtaggacgaaacacaaatgaaattaatataattaaatcaaatactggtgcagaaaacattgacgcattaaaaagagaattagctgaagttaaaaaaagtgttaatcttgataaaataaaagacatagaaagtcaaattgaattattaaaatctaaacaaaacaatgacaacacaattcaagaaatacaagaggatattaataagttaaaacaaaattcaagttctgggaaacttgaaagtttagaacaaaccattaatgacatcaaagcaaataccaaccttgataagataaaagagttagaaacaaaattaaacagtattaaccaaaaagattatacacaggatattaattcaattaaatctgacatcgctactttaaaaacaaataatgataaaatatcaaaaattgaaaaagttattcaagaattaaaagacagaccagttgttgacggaaacggtcatattgatttatcaaaatatgataatgatattagtgatttaaaacaaaaaacatcaacaaacgaatcaagtataagcgttttatcaacaaaagtggataacttaaatatagatactaaaattgcacaatctaaatcagaaattgaacaaaattttgatcaaaaaattaacagtgcaaaattacaatttaatgatacaggttggcaagatgtgcaacttgaaagtggtattgttgcaagtgatagcaacgggggttatcccgcaccgcaatatcgtattgtaacaattaatggtgttaaaaccatacaattaaaaggggtattaaaagggattaagaaaaacggtgatattaaattaggtacgattaacgcaaacttaaaatcaacacatcactacacacaatgtgcgattgataataaaatgatgaatacaagattatatttaaactttaataatgaattacattttgttacatcaaattatagcgatagtgacttaacaaatggagataaacgttttgcaatagatacacaaatcattgaataaaaatgttataatagtcgtataaattatttatacgactattttttatggaggtaaaaatgagaaaattaacaaattttaaatttttctataacacaccgtttacagactatcaaaatacaattcattttaatagtaataaagagcgtgatgattattttttaaacggtcgtcattttaaatcattagactattccaaacaaccgtataattttatacgtgatagaatggaaatcaatgttgatatgcagtggcatgacgcacaagggattaactacatgacgtttttatcagattttgaggatagacgctattacgcttttgtgaatcaaatcgaatatgtgaatgatgttgtggtaaaaatatattttgtgattgatactattatgacgtatacacaaggtaatgtattagaacaactttcaaacgttaatattgaacgtcaacacttatcaaagcgtacgtataactatatgttgccgatgttacgtaacaatgatgatgtgttaaaagtatcaaataaaaactatgtgtataaccaaatgcaacagtatttggaaaatttagtgttattccagtcaagcgctgatttatcaaagaaatttggtacgaaaaaagagccaaacttagatacgtctaaaggtacgatatatgacaatatcacatcgccagtcaacttatacgttatggaatatggtgactttattaactttatggataaaatgagtgcatatccatggattacacaaaactttcaaaaggttcaaatgttacctaaagattttattaatacaaaagatttagaggacgttaagacaagtgaaaaaattactggattaaagacattaaaacagggtggaaaatcaaaagaatggagtttaaacgatttatcattaagtttcacaaagcttcaagagatgatgttgtctaaaaaagacgagtttaaacatatgatacgtaatgagtacatgacgattgaattttatgactggaacggtaacacaatgttacttgacgctggtaaaatttcacaaaaaacaggtgttaagttacgtacaaaatccatcattggttatcataatgaagtgcgagtatatccagttgattataacagtgctgaaaacgatagaccgatacttgctaaaaataaagatatattaattgatacaggttcattcttaaataccaatataacatttaatagttttgcgcaagtgcctatattaattaataacggaattttaggacaatcacaacaagccaatagacagcgtaatgcagaaagtcaattaatcacaagtcgtatagataatgtattaaatggtagtgacccaaaatcacgtttttatgacgctgtaagtgtagcaagtaatttaagtccaaccgctttatttggtaagtttaatgaagaatataatttctacaaacaacaacaggcagaatataaagatttagccttacaaccaccatctgtgacagaatcagaaatgggaaacgcattccaaattgcaaatagcattaacggtttaacgatgaaaattagtgtaccgtcacctaaagaaattacatttttacaaaaatattatatgttgtttggttttgaagtaaatgactataatacattcattgaacctattaacagcatgactgtatgcaactatttaaaatgtacaggtacgtataccatacgtgacattgaccctatgttaatggaacaattaaaagcaattttagaatctggtgtgagattttggcataatgacggttcaggtaatccaatgttacagaacccgttaaataataaatttagagaaggtgtataaaatgaatgaggtaaaattaagatttacggacacagaagcatttcatatgttcatatatgcaggtgatttaaagttactatattttttatttgttttgatgattatagatgttgttactggttttgctaaagcaattaaaaataataatctatggtctaaaaaatcaatgaaaggttttgctaaaaaattattgatattctgtattatcattttagctaacatcattgaccagattttacaattaaaaggtggtttactcatgattacgattttctattatatcgcaaatgagggactatctattgttgaaaattgtgctgaaatggacgtattagtgcctgaacaaattaaagataaattaagagtaattaaaaacgattctgaaaagggtgataataatgaacgaccaagagaagatagataaatttacgcattcgtatattaatgatgatttcggtttaacgatagaccagttagtccctaaagtaaaagggtatggacgctttaatgtatggctaggtggtaatgaaagtaaaatcagacaagtattaaaagcagtaaaagagataggtgtgtcacctactctttttgctgtatatgaaaaaaatgaagggtatagcgctggtttaggttggttgaaccatacatctgcacgaggtgactatttaacagacgctaaattcattgcaagaaaattagtatcacaatcaaaacaagcaggacaaccgtcttggtatgacgcaggtaacatcgttcactttgtacctcaagacgtacaaagaaaaggtaatgcagattttgctaaaaatatgaaagcaggtacaatcggacgtgcgtatattccattaacagcagcggctacttgggcggcatattatcccctaggtttgaaagcgtcatataataaagtacaaaactatggtaatccttttttagacggtgcaaatactattttagcatggggtggtaaattagacggtaaaggtggttcacctagtgattcgtctgacagtggtagtagtggtgacagtggtagttcactgctcgctttagcaaaacaagccatgcaagaattattaaaaaaagtacaagacgcattacaatgggatgtacacagtattggtagtgataaattttttagtaatgattattttacattacaaaaaacatttaacaacacatatcatattaaaatgacgattgggctacttgattcattaaaaaaactgattgatagtgtgcaagtagatagtggggatagtagttcaaaccctactgatgatgacggggaccataaaccaattagtggtaagtcagtcaaaccaaatggtaaaagtggacgcgtcattggtggtaactggacgtatgcacagttaccagaaaaatataaaaaagcaattggtgtacctttattcaaaaaagaatacttgtacaaaccaggtaacatatttcctcaaacgggtaatgcaggacaatgtacagaattaacatgggcatatatgtcacaattacatggtaaaagacaaccaacagacgacggtcaaataacaaacggtcaacgtgtgtggtacgtatataaaaagttaggtgcaaaaacaacacataatccaacagtagggtatggtttttcaagtaaaccaccatacttacaagcaacagcatatggcattggtcacacaggtgtcgttgtagcagtatttgacgatggttcattcttagtagcaaactataacgtcccaccatacgtggcaccgtcacgggttgtattatatacattgattaatggtgtacctcataacgctggtgataatattgtattcttcagtggtattgcttaattaactatgctataatgaaaacatgctagtaatgctagtaaataaaatacaaaacataatcaattttcgtacacatttttcatgttatatcaaaagaaaaaggcgactgttatttaacagttgcctttttttaattcatcgtgttcacgttttaatatatgcaaattagatttattatgcactgaacgtacaactggaaataagtcattaagtgagaatgaaccgatgtcactttcaatataaagaatatcatcaaattgactatggtcaaaattttctctagcgtcttttaagataaattcacgtttcatattaagttcatcagtaaaatattcatcatatacattaccgcatacaatttctgttttagacggataaatcgatatcgtaccctgttcgttatagatacttttattgttttctattatcacaccgtcaaagaattgttcacgtacaaaggtttcaaaatcgacgcttgtatcaaaggcgcttttcggtataccagcagaagcaattttaatctttccattcacttcatatgcatattttttatgattcagtacaaacatcttatctatctgttcgttttcaatatcccatttacctaaggctatcgggtcgaataaactggggttcaataagggtttaacaacggatttcatatacaaactatcagtatcgcaataaataaaattgtcgtcaatttcattttcagttaagtattggaaaggtaccaataagttatataatgaacgtgatgtgacaaatgtagagaataatatattacgttcagtgtttttgtaaccgttaatgatattatatagttcgttgttatcatctaaacggaataagttaaaatgtgaacgtaatgcaggtatgccatataatccgttaagtacaactttagacaacataacctcctcatttgagtaagggtgttcgttgatgtcatcagtaatatgatagtcgtaaggtgatgtcatgttgattttgttttttaacttaccttgtgttttaataaaatagttttgaaatataatatcacgtgcatgaaagtattcacattcatatatcacaaacgaattaacacgtatatgcgtgcaatcaatacccgtaatgtcttgaatcattcttaatgtatttgtattaatattaacgtaatcattatcattattatagtattttacaatcatttgacgtaatacacgtgatttgattttaattaataaatcattgttaaatacatctttatcaatcttatataatgaaaaataattgtcatcatctaaaaaagtagggattaatgtaggttctgaataatgttcataaaagtataaccatgtcggaattttctcatgatacatcacataaggataactggaattgatatcaatagaaaaacaaggctcatcaataagtttgtttatgtatttagtgttatacatatttaaaccaccacgataaaatgatttgatataatcataaaaattcatatcatggaaatgataatgtgtatatgatattttaatatcttgatattgattgagtaactgaaaacgcgtcatttgattatttaaatacgattccataatattcaatgaaaatgttaatttgttatagtcaaaatttggaaatatatcactataatgaatatggcacatacctaatataataacgtcattatgaatgtatgtaagttgttcaggtgtgagtttagcaaaacactttacggcatagtcataggcttcactatctgacatgtcgttatctttatcaaatatcgtgtaattaaaatctgttttaagttggtcgtctgttaaataaccaccgtcaagcaactttttacctaatgttgcaattgatgtatttgttttcataaagttatcaataatattaaatttaaatccatttaaaaacattgttaagtctaaattaatagacgatttcacacgtttttctaaaatcacattttgatttttagctaaaatagtagcctcttgcatctttagtgtgtgttcgttttcttctgcagattttaaatatatattttcacgtgtgatattatcaaaataacgcatggtatctttaagtaaaaaatggttgtcatacttattacagttatgtgcaatcatgataatatctgtttttgacttagtgattgtatcacgtcgtttcacatacgtataaaatgcgtcataaaacgattcaaaactaggaaatacttctacatcaatctcataaccattaaaccaaccaattgctactgaatacgttacgtttttatatttggttggtttttttcgtccgttaactttattgtacgctaatgtttctatatcccagtataaaatcattcgacgttcatgtttatgatattgcatgcattctagtaatcccataatcttacacaccttttataagccgtattgtttcattaaatacttctttgtattttcaatatagttatcttcatatattttttcttttctttcaaattcactcatatttttcttcatttcattttttatatgaaattttataattttattcatatctaaatataaatatctatcattatcaacaacgtaattttttgagtaagcgttatcaaaatgtaaattgcttggattgtaataataacgctccatgttttctttataaaacatatcttctcttaaataaataacattgtcatctatatctttgattttagtacaaaattcatattgttttgtataaggtataacaataatattagcattaaatgtatcaacattatacataatttttatatatttatcgtcagttttaatatagaaaaaatcaccgttttgattgatatgatttcttaaattatcatctgccaaattatattcgttaaattcaaactcgccagtagtcatagcgtcatcgtttgaattgaatgcccgtgtgttacgcttttcatttacgtaatcgtttcttcgcatttctaaaaaaatgtttttgtaaagtcgtgatgtgttcattttatgtttttgtaataagttatatatatttaaattggataatataggacttgaaaagttgactgcattacctagtaaaaacattttaggaaagccaatataatcaacattaccatggttacggtcgattgattcataaattgtttttaacttatcccactcgtcaattaaatagtcatcttcaagtgctaaaaattcatcatatataatgatagggtagtgttttaaaaagttagaatgatattttaaatcagttgcactattcaaatctgtaatcacaccgatttccttatcttgatagatgatagctaaatagtccctagcgcttctgaatgtgacacgcttagatttgaatagtgggtttttgtctatgatttcctcaataaaatcacgataagcgtcacgtaatgtataatgacgtgataataaagtaaatttaatatcaagttttatagctaaataaataaagaatgaaacatagttgaacgattttccgtcagaacggtttgaaatagatatgtaatagtctatatcatcattcatgagttcatcaactaattctatttgattatagttatctggtattttttttctgacatgattgacagcattttgataatctcttaccatgtctaaacgattttgtttcaccatgtttttgctccttataatagtttatgatgtcgtttacagtattaaaattactcttcaaatgttgcataatataaaaagttatacctcacatctttatcatcaatagtagtcactggtctgtctgatttaccaatttctttgtataaagtgtcaatttctttaatatatttatacatagaagaattattatttttagcttgtaattcatataaagcatatttatgttttttagcgtttttattattagattcatctttacggttatatatttcaagtatatagtttaattgttcatgtcttttacctcttaccaatgatacggcatttgcatatgacacgtttctttcttttggaaaatagggcaaatgtgcgaaatgtttccatgtgtctatgtacgcctcttgtaaatctttatcatcaaatttaaaattaacagtactaaaatcatttaaaaacaattctttttcctgctcttttcttgcgtctctttcttttttccatttatccatttcggacgtatgtctaaccattgctaacgacctccatataacccatatataaccactaaaaagataatgtagaatataatcaatgtagtaaataaaacaccaaatgacacacgtatatgcattgtcataagtattacaagtgtaattaaaaatgctaaaaggaaaataatagctatgtttaatatattagtcatgttctatcacgttcccgttattatatatcactttgttttgaaaaattattgttatattactttctattggtttctcgaaatattctaatacgtcatcaatagtacaatccataaaaacttcttttttatataatgggtttaaatgttctcgataaaaaacctcaagacaactaaaactatatgtacgaacatcaacgtcaatgtctaaagtaaataaatcattgtattttgtatcactatcatagtattcaatagaaatttcaccgtatctaacaaaaacaacacattttccacttagtgattcaaattttgttattttattcataaaacaatctctattatctaaaatataattaattaatttttttgtgtttaatattgttgtaatattcattttatatctccttaatgtattttacacaaagattatatgcaccttttttgtaaaagtttgcgtcaaaataactatatattaccttaactttatttattttttcgaattgttcaatttcatgttcatatgtttcattaattgatacattgtataataatacggcagtgtatattttttccattgtttagcacctcataaaaataggggataaatatcccctataaaattgtattaaaatgatactggaccaaagttgattgagtaacctttttgaccttttttgttttcatattcataaattgtaaattgcacttcaccagcattgataatgttaacaacgtcctcgtcttgacgcatgtctttaattaattcagttaagtgattcggtaagtttacgttatagtcgtcagtgacgataacaccttgttcaccgaattttgattctttgtttgtgaataatgctctaacgatatactcttttttcataccgtatttttctactaattctgatagtttaataaattctctttctttttcctcaaattcaaatctcgctaatgtgttttggtgtcttgataaaatatcttttacgtttgtcatttttatttctcctcttatttaaattatttgctttctggaattgaaatttgtagtaaatcattgtaataaacttgaattgttttcgttgtgcgtgtagtggataaaagtttgtgtgaattaggtaataaatcttttgcttgtgtttttgataaatgatactcatgaagtggaataaattcttcaacatattcatttttatcatctaaatagtgaagaatataacctttaattcgtaatgtaacaatatcatcaggtttcattattatatcactcctttctaaaaaacgtaaacgttatacgtttcataaaatcctttgtgcatattccattgttctattgggtcatcaccagcaatgtaagataaaatagattctggtttagtttcgttgtttagttcatcatttaagaattgaacaacagaactattatagtttaataatagttgttggcaagccgatactaagttaattgcattgtcgaaagtataagctggattccattgaataagtttattgaatagttgcaacatttcagtatatgcttgacctttttctgcaggtgcattatcaacattaaccattattatcactccttaaatcattgatttcattccttaattcatcaacgatttttttaggtgaattatggtctaattgttcaaaatcgtccttttcaagtacaaataatgttaattcataagttgatgtattacccataacaataactatattaccattttttaaaatgtaagtttgtaaaggttgtacattttccattttgttacctccttgatttgattacatacatagtatagcaaacgtttaaaagttttgtcaatggtttttcttaaaaagtttaaataatttaaaaatactatttaatagaagaaattagattttaaatacaaatcataattttgaataaaagtcaatagatacatatattttgtattttatgaatatgttataggtttgataagttggaaaagtagaagcacagtttttataagtttagtaaagaaatgataagttaatttataagttttgatttgtataatcgtttattttaaacggtggggaggtgtaattt

SEQ ID NO: 105 - DNA, 18130 bp, Rosenblumvirus sp.; identical to SEQ ID NO: 104
  source 1..18130: mol_type = genomic DNA

SEQ ID NO: 106 - DNA, 18130 bp, Rosenblumvirus sp.
  source 1..18130: mol_type = genomic DNA
aaattacacctccccaccgtttaaaataaacgattatacaaatcaaaacttataaattaacttatcatttctttactaaacttataaaaactgtgcttctacttttccaacttatcaaacctataacatattcataaaatacaaaatatatgtatctattgacttttattcaaaattatgatttgtatttaaaatctaatttcttctattaaatagtatttttaaattatttaaactttttaagaaaaaccattgacaaaacttttaaacgtttgctatactatgtatgtaatcaaatcaaggaggtaacaaaatggaaaatgtacaacctttacaaacttacattttaaaaaatggtaatatagttattgttatgggtaatacatcaacttatgaattaacattatttgtacttgaaaaggacgattttgaacaattagaccataattcacctaaaaaaatcgttgatgaattaaggaatgaaatcaatgatttaaggagtgataataatggttaatgttgataatgcacctgcagaaaaaggtcaagcatatactgaaatgttgcaactattcaataaacttattcaatggaatccagcttatactttcgacaatgcaattaacttagtatcggcttgccaacaactattattaaactataatagttctgttgttcaattcttaaatgatgaactaaacaacgaaactaaaccagaatctattttatcttacattgctggtgatgacccaatagaacaatggaatatgcacaaaggattttatgaaacgtataacgtttacgttttttagaaaggagtgatataataatgaaacctgatgatattgttacattacgaattaaaggttatattcttcactatttagatgataaaaatgaatatgttgaagaatttattccacttcatgagtatcatttatcaaaaacacaagcaaaagatttattacctaattcacacaaacttttatccactacacgcacaacgaaaacaattcaagtttattacaatgatttactacaaatttcaattccagaaagcaaataatttaaataagaggagaaataaaaatgacaaacgtaaaagatattttatcaagacaccaaaacacattagcgagatttgaatttgaggaaaaagaaagagaatttattaaactatcagaattagtagaaaaatacggtatgaaaaaagagtatatcgttagagcattattcacaaacaaagaatcaaaattcggtgaacaaggtgttatcgtcactgacgactataacgtaaacttaccgaatcacttaactgaattaattaaagacatgcgtcaagacgaggacgttgttaacattatcaatgctggtgaagtgcaatttacaatttatgaatatgaaaacaaaaaaggtcaaaaaggttactcaatcaactttggtccagtatcattttaatacaattttataggggatatttatcccctatttttatgaggtgctaaacaatggaaaaaatatacactgccgtattattatacaatgtatcaattaatgaaacatatgaacatgaaattgaacaattcgaaaaaataaataaagttaaggtaatatatagttattttgacgcaaacttttacaaaaaaggtgcatataatctttgtgtaaaatacattaaggagatataaaatgaatattacaacaatattaaacacaaaaaaattaattaattatattttagataatagagattgttttatgaataaaataacaaaatttgaatcactaagtggaaaatgtgttgtttttgttagatacggtgaaatttctattgaatactatgatagtgatacaaaatacaatgatttatttactttagacattgacgttgatgttcgtacatatagttttagttgtcttgaggttttttatcgagaacatttaaacccattatataaaaaagaagtttttatggattgtactattgatgacgtattagaatatttcgagaaaccaatagaaagtaatataacaataatttttcaaaacaaagtgatatataataacgggaacgtgatagaacatgactaatatattaaacatagctattattttccttttagcatttttaattacacttgtaatacttatgacaatgcatatacgtgtgtcatttggtgttttatttactacattgattatattctacattatctttttagtggttatatatgggttatatggaggtcgttagcaatggttagacatacgtccgaaatggataaatggaaaaaagaaagagacgcaagaaaagagcaggaaaaagaattgtttttaaatgattttagtactgttaattttaaatttgatgataaagatttacaagaggcgtacatagacacatggaaacatttcgcacatttgccctattttccaaaagaaagaaacgtgtcatatgcaaatgccgtatcattggtaagaggtaaaagacatgaacaattaaactatatacttgaaatatataaccgtaaagatgaatctaataataaaaacgctaaaaaacataaatatgctttatatgaattacaagctaaaaataataattcttctatgtataaatatattaaagaaattgacactttatacaaagaaattggtaaatcagacagaccagtgactactattgatgataaagatgtgaggtataactttttatattatgcaacatttgaagagtaattttaatactgtaaacgacatcataaactattataaggagcaaaaacatggtgaaacaaaatcgtttagacatggtaagagattatcaaaatgctgtcaatcatgtcagaaaaaaaataccagataactataatcaaatagaattagttgatgaactcatgaatgatgatatagactattacatatctatttcaaaccgttctgacggaaaatcgttcaactatgtttcattctttatttatttagctataaaacttgatattaaatttactttattatcacgtcattatacattacgtgacgcttatcgtgattttattgaggaaatcatagacaaaaacccactattcaaatctaagcgtgtcacattcagaagcgctagggactatttagctatcatctatcaagataaggaaatcggtgtgattacagatttgaatagtgcaactgatttaaaatatcattctaactttttaaaacactaccctatcattatatatgatgaatttttagcacttgaagatgactatttaattgacgagtgggataagttaaaaacaatttatgaatcaatcgaccgtaaccatggtaatgttgattatattggctttcctaaaatgtttttactaggtaatgcagtcaacttttcaagtcctatattatccaatttaaatatatataacttattacaaaaacataaaatgaacacatcacgactttacaaaaacatttttttagaaatgcgaagaaacgattacgtaaatgaaaagcgtaacacacgggcattcaattcaaacgatgacgctatgactactggcgagtttgaatttaacgaatataatttggcagatgataatttaagaaatcatatcaatcaaaacggtgattttttctatattaaaactgacgataaatatataaaaattatgtataatgttgatacatttaatgctaatattattgttataccttatacaaaacaatatgaattttgtactaaaatcaaagatatagatgacaatgttatttatttaagagaagatatgttttataaagaaaacatggagcgttattattacaatccaagcaatttacattttgataacgcttactcaaaaaattacgttgttgataatgatagatatttatatttagatatgaataaaattataaaatttcatataaaaaatgaaatgaagaaaaatatgagtgaatttgaaagaaaagaaaaaatatatgaagataactatattgaaaatacaaagaagtatttaatgaaacaatacggcttataaaaggtgtgtaagattatgggattactagaatgcatgcaatatcataaacatgaacgtcgaatgattttatactgggatatagaaacattagcgtacaataaagttaacggacgaaaaaaaccaaccaaatataaaaacgtaacgtattcagtagcaattggttggtttaatggttatgagattgatgtagaagtatttcctagttttgaatcgttttatgacgcattttatacgtatgtgaaacgacgtgatacaatcactaagtcaaaaacagatattatcatgattgcacataactgtaataagtatgacaaccattttttacttaaagataccatgcgttattttgataatatcacacgtgaaaatatatatttaaaatctgcagaagaaaacgaacacacactaaagatgcaagaggctactattttagctaaaaatcaaaatgtgattttagaaaaacgtgtgaaatcgtctattaatttagacttaacaatgtttttaaatggatttaaatttaatattattgataactttatgaaaacaaatacatcaattgcaacattaggtaaaaagttgcttgacggtggttatttaacagacgaccaacttaaaacagattttaattacacgatatttgataaagataacgacatgtcagatagtgaagcctatgactatgccgtaaagtgttttgctaaactcacacctgaacaacttacatacattcataatgacgttattatattaggtatgtgccatattcattatagtgatatatttccaaattttgactataacaaattaacattttcattgaatattatggaatcgtatttaaataatcaaatgacgcgttttcagttactcaatcaatatcaagatattaaaatatcatatacacattatcatttccatgatatgaatttttatgattatatcaaatcattttatcgtggtggtttaaatatgtataacactaaatacataaacaaacttattgatgagccttgtttttctattgatatcaattccagttatccttatgtgatgtatcatgagaaaattccgacatggttatacttttatgaacattattcagaacctacattaatccctacttttttagatgatgacaattatttttcattatataagattgataaagatgtatttaacaatgatttattaattaaaatcaaatcacgtgtattacgtcaaatgattgtaaaatactataataatgataatgattacgttaatattaatacaaatacattaagaatgattcaagacattacgggtattgattgcacgcatatacgtgttaattcgtttgtgatatatgaatgtgaatactttcatgcacgtgatattatatttcaaaactattttattaaaacacaaggtaagttaaaaaacaaaatcaacatgacatcaccttacgactatcatattactgatgacatcaacgaacacccttactcaaatgaggaggttatgttgtctaaagttgtacttaacggattatatggcatacctgcattacgttcacattttaacttattccgtttagatgataacaacgaactatataatatcattaacggttacaaaaacactgaacgtaatatattattctctacatttgtcacatcacgttcattatataacttattggtacctttccaatacttaactgaaaatgaaattgacgacaattttatttattgcgatactgatagtttgtatatgaaatccgttgttaaacccttattgaaccccagtttattcgacccgatagccttaggtaaatgggatattgaaaacgaacagatagataagatgtttgtactgaatcataaaaaatatgcatatgaagtgaatggaaagattaaaattgcttctgctggtataccgaaaagcgcctttgatacaagcgtcgattttgaaacctttgtacgtgaacaattctttgacggtgtgataatagaaaacaataaaagtatctataacgaacagggtacgatatcgatttatccgtctaaaacagaaattgtatgcggtaatgtatatgatgaatattttactgatgaacttaatatgaaacgtgaatttatcttaaaagacgctagagaaaattttgaccatagtcaatttgatgatattctttatattgaaagtgacatcggttcattctcacttaatgacttatttccagttgtacgttcagtgcataataaatctaatttgcatatattaaaacgtgaacacgatgaattaaaaaaaggcaactgttaaataacagtcgcctttttcttttgatataacatgaaaaatgtgtacgaaaattgattatgttttgtattttatttactagcattactagcatgttttcattatagcatagttaattaagcaataccactgaagaatacaatattatcaccagcgttatgaggtacaccattaatcaatgtatataatacaacccgtgacggtgccacgtatggtgggacgttatagtttgctactaagaatgaaccatcgtcaaatactgctacaacgacacctgtgtgaccaatgccatatgctgttgcttgtaagtatggtggtttacttgaaaaaccataccctactgttggattatgtgttgtttttgcacctaactttttatatacgtaccacacacgttgaccgtttgttatttgaccgtcgtctgttggttgtcttttaccatgtaattgtgacatatatgcccatgttaattctgtacattgtcctgcattacccgtttgaggaaatatgttacctggtttgtacaagtattcttttttgaataaaggtacaccaattgcttttttatatttttctggtaactgtgcatacgtccagttaccaccaatgacgcgtccacttttaccatttggtttgactgacttaccactaattggtttatggtccccgtcatcatcagtagggtttgaactactatccccactatctacttgcacactatcaatcagtttttttaatgaatcaagtagcccaatcgtcattttaatatgatatgtgttgttaaatgttttttgtaatgtaaaataatcattactaaaaaatttatcactaccaatactgtgtacatcccattgtaatgcgtcttgtactttttttaataattcttgcatggcttgttttgctaaagcgagcagtgaactaccactgtcaccactactaccactgtcagacgaatcactaggtgaaccacctttaccgtctaatttaccaccccatgctaaaatagtatttgcaccgtctaaaaaaggattaccatagttttgtactttattatatgacgctttcaaacctaggggataatatgccgcccaagtagccgctgctgttaatggaatatacgcacgtccgattgtacctgctttcatatttttagcaaaatctgcattaccttttctttgtacgtcttgaggtacaaagtgaacgatgttacctgcgtcataccaagacggttgtcctgcttgttttgattgtgatactaattttcttgcaatgaatttagcgtctgttaaatagtcacctcgtgcagatgtatggttcaaccaacctaaaccagcgctatacccttcatttttttcatatacagcaaaaagagtaggtgacacacctatctcttttactgcttttaatacttgtctgattttactttcattaccacctagccatacattaaagcgtccatacccttttactttagggactaactggtctatcgttaaaccgaaatcatcattaatatacgaatgcgtaaatttatctatcttctcttggtcgttcattattatcacccttttcagaatcgtttttaattactcttaatttatctttaatttgttcaggcactaatacgtccatttcagcacaattttcaacaatagatagtccctcatttgcgatataatagaaaatcgtaatcatgagtaaaccaccttttaattgtaaaatctggtcaatgatgttagctaaaatgataatacagaatatcaataattttttagcaaaacctttcattgattttttagaccatagattattatttttaattgctttagcaaaaccagtaacaacatctataatcatcaaaacaaataaaaaatatagtaactttaaatcacctgcatatatgaacatatgaaatgcttctgtgtccgtaaatcttaattttacctcattcattttatacaccttctctaaatttattatttaacgggttctgtaacattggattacctgaaccgtcattatgccaaaatctcacaccagattctaaaattgcttttaattgttccattaacatagggtcaatgtcacgtatggtatacgtacctgtacattttaaatagttgcatacagtcatgctgttaataggttcaatgaatgtattatagtcatttacttcaaaaccaaacaacatataatatttttgtaaaaatgtaatttctttaggtgacggtacactaattttcatcgttaaaccgttaatgctatttgcaatttggaatgcgtttcccatttctgattctgtcacagatggtggttgtaaggctaaatctttatattctgcctgttgttgtttgtagaaattatattcttcattaaacttaccaaataaagcggttggacttaaattacttgctacacttacagcgtcataaaaacgtgattttgggtcactaccatttaatacattatctatacgacttgtgattaattgactttctgcattacgctgtctattggcttgttgtgattgtcctaaaattccgttattaattaatataggcacttgcgcaaaactattaaatgttatattggtatttaagaatgaacctgtatcaattaatatatctttatttttagcaagtatcggtctatcgttttcagcactgttataatcaactggatatactcgcacttcattatgataaccaatgatggattttgtacgtaacttaacacctgttttttgtgaaattttaccagcgtcaagtaacattgtgttaccgttccagtcataaaattcaatcgtcatgtactcattacgtatcatatgtttaaactcgtcttttttagacaacatcatctcttgaagctttgtgaaacttaatgataaatcgtttaaactccattcttttgattttccaccctgttttaatgtctttaatccagtaattttttcacttgtcttaacgtcctctaaatcttttgtattaataaaatctttaggtaacatttgaaccttttgaaagttttgtgtaatccatggatatgcactcattttatccataaagttaataaagtcaccatattccataacgtataagttgactggcgatgtgatattgtcatatatcgtacctttagacgtatctaagtttggctcttttttcgtaccaaatttctttgataaatcagcgcttgactggaataacactaaattttccaaatactgttgcatttggttatacacatagtttttatttgatacttttaacacatcatcattgttacgtaacatcggcaacatatagttatacgtacgctttgataagtgttgacgttcaatattaacgtttgaaagttgttctaatacattaccttgtgtatacgtcataatagtatcaatcacaaaatatatttttaccacaacatcattcacatattcgatttgattcacaaaagcgtaatagcgtctatcctcaaaatctgataaaaacgtcatgtagttaatcccttgtgcgtcatgccactgcatatcaacattgatttccattctatcacgtataaaattatacggttgtttggaatagtctaatgatttaaaatgacgaccgtttaaaaaataatcatcacgctctttattactattaaaatgaattgtattttgatagtctgtaaacggtgtgttatagaaaaatttaaaatttgttaattttctcatttttacctccataaaaaatagtcgtataaataatttatacgactattataacatttttattcaatgatttgtgtatctattgcaaaacgtttatctccatttgttaagtcactatcgctataatttgatgtaacaaaatgtaattcattattaaagtttaaatataatcttgtattcatcattttattatcaatcgcacattgtgtgtagtgatgtgttgattttaagtttgcgttaatcgtacctaatttaatatcaccgtttttcttaatcccttttaataccccttttaattgtatggttttaacaccattaattgttacaatacgatattgcggtgcgggataacccccgttgctatcacttgcaacaataccactttcaagttgcacatcttgccaacctgtatcattaaattgtaattttgcactgttaattttttgatcaaaattttgttcaatttctgatttagattgtgcaattttagtatctatatttaagttatccacttttgttgataaaacgcttatacttgattcgtttgttgatgttttttgttttaaatcactaatatcattatcatattttgataaatcaatatgaccgtttccgtcaacaactggtctgtcttttaattcttgaataactttttcaatttttgatattttatcattatttgtttttaaagtagcgatgtcagatttaattgaattaatatcctgtgtataatctttttggttaatactgtttaattttgtttctaactcttttatcttatcaaggttggtatttgctttgatgtcattaatggtttgttctaaactttcaagtttcccagaacttgaattttgttttaacttattaatatcctcttgtatttcttgaattgtgttgtcattgttttgtttagattttaataattcaatttgactttctatgtcttttattttatcaagattaacactttttttaacttcagctaattctctttttaatgcgtcaatgttttctgcaccagtatttgatttaattatattaatttcatttgtgtttcgtcctacactatctttagtagcgtttaaagattgtgtaagtgtttcatatttatcatcatactttaacattgatttttcaaattcatttaattgtgtttgatgttgttctaaactttcatttaatatgacatttttttcttttaatgaatcaatgtcttttttattactatcaatcattggttggaatttttttattttctctagaaatgttgatattttttctttgttatcattaattgcaatatcatgatgttctatttgaccactgtatttattaatcaatgtttttaaatcattataaaatgttaatttataataaccagtatcagtacggacataaatatgtccgtctgatgtactgattaagtcattttcttctgttaaaaaatctgctaacctgtctattgtttcaacttgtcttaaacttcttacgattctatcagccattgttcacacctcttatttgtatcgtttccaactaaactcaaagaaaaaacctaaaatacccattatgagaaaaccccccaaggaataccaacactataactattacccgttttaccgttccattttcttactggtaaataataacgtgtaccttgccagttgtaaccaatccatacatacccatctgataaacaaacttcgtcatatggtgtataaccatttggttggaaccaatatccattaggttcacttaatttaggactacctacacgtgcaaatattggtaaaaatccacatgtaaatgttgcattttcatttctgtaatatgtgccatattggttttgtttccattttccgaatgtgtttacttttgatgtttctaattcgttgctgttactagcagaaaatttaggtctaataaagtgtgttacaccgtcataataatgtgttcttattgttgctttttcccaaccgtcaaacccaccacctaaccagttttgctctaaacatgtataataatctaaattaccacttaacacacattgaatatgtccatattgtccatctgtatatacaccaacatcccctaattgtggtttaaagttcggtgtattttcatacaccattgctaaacctttaaagtcattattgattgcgtctttagcgttaccccacatacgaactttaccgtctgtaatgtaatatatataagcaacagctaagtcagcgcattgataaccaaatgctaaatcaaagtccacacctacaccctcatgcttatatatccattcttttgcttgttgttgtgatttcatgaaacattatcctttcttaacccaactatattgacgtttttttgtatctgcattaacgttactaaagaattctttatgttcggacacattagcctctaatgtttgtcttacttcaccgacagcgttaccacttgaaacacgtaaccatgcacccacttttttaatttcttctggtgcgtctctaaacaattccatttggttaccagtaatataatattcaccaggtgtcgtaacgtaagctatccagttattgtattgacttgcttctaaatactcttgatatggtgcgtctgttttgattgttgtccataaaccataatcccattttaatgtaaatacatcgagcgtcataccacgcatgattttaaccatttttcgaccagtagaaaaacgcgttaattcttgtactgtacctaatgtttgtgttgtagggtatacattgatgaaacaaccagcgtctataatttttttactaccattcattggcatatttttaagtttactagctgtaccaccgtcaatataatagaaccctgcttgtgttaagtcatttaagtcgtcaatatggtctggaattgataacgcacgtccatcgtcttttgttaatttatagttttgtgaacctctcgcacgtaatgcttcaaagtgttcatactcaccaagttgaaagaacccatataaattattgaatcgttttccaccaccgccattagtcatagcaagtaataacgatttacgttttgtttttggattggtataaatacaaataccctccggctctttaaagttatcacgtggaaaattaataccgtcttgatatgataatttaaacggataatcataaatcttttgaccagttgttaatgaatatttaccaatttgaacgtgtgaattaactgaactgttaccacttaaccagtataaatcatcaccatcaacggcaatcccttgcatccatcgattatcattgttttctgaattatcaatcgtcatttctttttctacattatcaatgtgattttttacgtcagctcttgaacgtacctgtattgtcccgtcaccgaatcttaaaacgattttgtcattttcttcatcaattaacggtgtaaacgtgtgtttgtttaaaagtgactgtggtgtataatctgttaaccctttagcctcttctaaatctaaaatataattatctttatatgcgacttgtaacagttttgctacaccgtcatgatgtaaccatattttcatttcaccgttagattgtctttctaaacctattgtagtaccgtgaccaccttgtacaatacgcatactagaaattaagtcaccgctaggcgttaatttattaatccaaaaaccttctgggttttgtgaatctgattgtgtagagtacatttgattcgtttctttatctatgtttatagattggttaacagcattacgaataccaccgaatcccataacaaactttggttcaagctcatttaattcaaaaccattaacaaaacggtcaatgtctttaattaagtctttaacttctgatttaaaatcattcatttgtttcatttctgcaactttaaataatgcaaatgcagatgtaagaccagtactatatttagtaaattcatcatgaataattttatctattgtaccgtcgtttaaccaacctctaaataagtctttcgcttggtctgggaatgctttcattaagtcgtcccaatttttgaaacgtttttttaattcattgtcatagtcccaaatacgacgtgctaatacttcaattagttttgataatcttgaaatataatcataatatgattttgaattggtattataatctgctctatcatcgtaaaacggtgtgtaacgttctctcgttttatatatttcgtctaaaaatggacgaatgtcgtcaaaatatttaaaatcgttttcattatatgccataattttccacctttaccaaatttgtaaaaaacattttttatcaaattcatttaaaattttctttcttaaatcgtatactttatcaatattatcaattaaatactgttttgaaaattgtgtacctttcgcattacctttttgattttgattacgttttgcgttttgattactttcgttacttgatttattcacagttttaccgttgtcaattgtattattatctgcaaatcgtaacgttgtgttatctacatcaatgttaacctcgctttgtggtaatgacgcataagcatttctgttcgctgtcatgccagttgaattgtctaaagatgttgcattttgatttgaggtttcatctgtattgtttgttgtatcttcattatgttctgtaaaaccttgtgattgtagatatttttcaacttcgcttgatgaataaaccacattcaaataatcctcatgtgtgatacatacagtaatcacttgcatgccaaaagcttcaactgtttgtctgttgatttctctatctaaaaagtgtattgtaaatgattttttaaaaagtaagtcagataagtcatctttaagtttaaaacctttaaacactttttcattaacgatggctaaaacgtctttgtcaaacttcaacattttttgcatgaattgaaattcatcatcataaaacgttaatttatcattatttacaaattcattaaaaccttttttaattaattctgatttaataaaatcaaataaagtcattgtatatctagccattgtattcactactttcatcattagacaatgtatctatcattgtgatttctgaagtaacttcatcgtcgtaatacggtttaatatctaaaccataacgttttgataagaatgtaatcggttcacgaccttttaaataaatattactatttgatgtggtaaaacctcggttgctttttgcctcttcgtccgaaacaccgctttccttatccactgctagtgagttaatacctaaatagttacttaattcactaattttattttggtattcgcgtttcatctcagttagtgctggaatcacactattactggttaaatctatgatatcatcatcggcgttaaacataggtgacattttaacaaatggtgcaccgttgtatatttccgatacaagttgattaactgactcatcattaatgtctgatttaaatattttgctaaattttgcttgcataattaatgagaatctagataaaacaacctcagataattcatcagtataatgttctataatttctatatcactattatattgaattggtttattttgcatgacaacaaagttaccactcatacagttatcatatattttatgaatctgtaagcattcatctggtattaaatagtctggaacaatgaaataaatatcatcttttgttaatcgtttttgaaattgaaagttaaagtttgatgaaaaatttggtgcttgattaaagtaagtattatttacgtaaccaagaatcataatttgttcatttcttgctttgccgaccactacattgatgttttgtcttaatgctgattctaattgaataaaatctataccaaccgtatcacgattggtatagttgatgagtagtggtaaaaattccaaataacgattaaacataagacgtttaaatctgttgcgatgttctacaactcttttgttgatttcttttgataattcaacctgtacacctttattatgtttagtcatttatagcacctctattattctgttcttggtgttacatcttggtcagtaattaaaattttattaaagaatgggctaatggctttaaatgaatagtaatgaatccagtgtgtgacttcatcaaattcaccattatagaatggttgttttaacataccttttgtgtaacgtttatatttaattgaattaatatccaaaataaacgcgtataaatctgattttggtttaatttcttcaacattatctttaaactctgatagttttgacacatcataagtgaatactgaaccaactggaattgtatcacctttatgagtttgataatcaccgtaagcacgtaagaaagctactgattcatcacttgatacgacaatatctttagtgactttgaaaacaccacctaggtcgtcaaaactgataacgtggtctgtaaagtcaatccctgctacttggaatgtgttcgcaatctttgtatctaaaagataagattttaagctatcagtcgttaaaataacaatatcttttaattttgaaactgttgtatattgtccgattgcaccacctgaagcacgatgaacttcattatatttagcgctgttgttttgtaagttaagaatagcttcaaaaactttacttgctaaatcttcttttgatgttgctttacgtacatttgattcagataattgattcaatgagtaatcaactaacattgcacgcatttctttttcttctaatacgttaatatcagaaattttctttttatagacacctaatgcataattagtagcgtctgctaatgtttggaaattgaaacgtgtgtcattgttatttaatgtaaatttttgtttcttcacaataccactaccatataacttagtagccatacgtggatagttacgtttcaacattagttcttcatttttagataagtccatgttaataggtactgtatccataattacatattcttcactgtattgacctataaagtcctgctctttagctaaccaattaaaacggttacctaatgcaatatcgattaataacgtttcattaatcttagggaataaaaatttatttacaaatgtttcaaacattgtattagaattatcccacttatcgccaaacgtccatgattttgaataagtatgattaaagtcttgtaatgcagatttagctgactttgcaactaatagtgctgtttcgttttttgtactcttttctgccatgatttattattcctcctcaacatcgccagtaaatgactgttttgaaagtgaatgaatttgtacaccataactatcttcacttttatttgtatcaattgacatattttcatttaattctgttcgtttatttaatcttgaatcttcatatgatgtacccatcatagaacgcatgttgttaccctcgtacatgtttaagttcctcctaatctaaatctaatttatcgacaagttcttcatctgaatagtctttatcattgttatctgtttcttttgattctggttgtggttgtggttgtggttgtggttgttgcatttgtgatgtttcaaaattagtaaatcgttgttctaatgaagcgatacgttgttctaaaacaactgggtctaattttgcacaatcttcatctgttgtagtaggttctaatttgttttcattttcttcttcgattgtttctactgttttatcttcagttgattcttcagttgattcttcagttgattctgaagtttcttcagttgattctgaagtttcttctttgtcgtctggttttacgatttcatcaaattctgtcattttgacacctccaaatattttataactaattatatcatagaatatttaaataagtaaattaaatttattttattttcaaatcataactttgaataaaagtcaatagatacataaattttgtatttaatgaatatgtaataggttagataagttggaaaagtagacgcacagtttttataagtttagtaaagaaatgatatgttaatttataagttttgatttgtataatcgtttattttaaacggtggggaggtgtaaatttacaataactttttccc

SEQ ID NO: 107 - DNA, 18151 bp, Rosenblumvirus sp.
  source 1..18151: mol_type = genomic DNA
gggaaaaagttattgtaaatttacacctccccaccgtttaaaataaacgattatacaaatcaaaacttataaattaacatatcatttctttactaaacttataaaaactgtgcgtctacttttccaacttatctaacctattacatattcattaaatacaaaatttatgtatctattgacttttattcaaagttatgatttgaaaataaaataaatttaatttacttatttaaatattctatgatataattagttataaaatatttggaggtgtcaaaatgacagaatttgatgaaatcgtaaaaccagacgacaaagaagaaacttcagaatcaactgaagaaacttcagaatcaactgaagaatcaactgaagaatcaactgaagataaaacagtagaaacaatcgaagaagaaaatgaaaacaaattagaacctactacaacagatgaagattgtgcaaaattagacccagttgttttagaacaacgtatcgcttcattagaacaacgatttactaattttgaaacatcacaaatgcaacaaccacaaccacaaccacaaccacaaccagaatcaaaagaaacagataacaatgataaagactattcagatgaagaacttgtcgataaattagatttagattaggaggaacttaaacatgtacgagggtaacaacatgcgttctatgatgggtacatcatatgaagattcaagattaaataaacgaacagaattaaatgaaaatatgtcaattgatacaaataaaagtgaagatagttatggtgtacaaattcattcactttcaaaacagtcatttactggcgatgttgaggaggaataataaatcatggcagaaaagagtacaaaaaacgaaacagcactattagttgcaaagtcagctaaatctgcattacaagactttaatcatacttattcaaaatcatggacgtttggcgataagtgggataattctaatacaatgtttgaaacatttgtaaataaatttttattccctaagattaatgaaacgttattaatcgatattgcattaggtaaccgttttaattggttagctaaagagcaggactttataggtcaatacagtgaagaatatgtaattatggatacagtacctattaacatggacttatctaaaaatgaagaactaatgttgaaacgtaactatccacgtatggctactaagttatatggtagtggtattgtgaagaaacaaaaatttacattaaataacaatgacacacgtttcaatttccaaacattagcagacgctactaattatgcattaggtgtctataaaaagaaaatttctgatattaacgtattagaagaaaaagaaatgcgtgcaatgttagttgattactcattgaatcaattatctgaatcaaatgtacgtaaagcaacatcaaaagaagatttagcaagtaaagtttttgaagctattcttaacttacaaaacaacagcgctaaatataatgaagttcatcgtgcttcaggtggtgcaatcggacaatatacaacagtttcaaaattaaaagatattgttattttaacgactgatagcttaaaatcttatcttttagatacaaagattgcgaacacattccaagtagcagggattgactttacagaccacgttatcagttttgacgacctaggtggtgttttcaaagtcactaaagatattgtcgtatcaagtgatgaatcagtagctttcttacgtgcttacggtgattatcaaactcataaaggtgatacaattccagttggttcagtattcacttatgatgtgtcaaaactatcagagtttaaagataatgttgaagaaattaaaccaaaatcagatttatacgcgtttattttggatattaattcaattaaatataaacgttacacaaaaggtatgttaaaacaaccattctataatggtgaatttgatgaagtcacacactggattcattactattcatttaaagccattagcccattctttaataaaattttaattactgaccaagatgtaacaccaagaacagaataatagaggtgctataaatgactaaacataataaaggtgtacaggttgaattatcaaaagaaatcaacaaaagagttgtagaacatcgcaacagatttaaacgtcttatgtttaatcgttatttggaatttttaccactactcatcaactataccaatcgtgatacggttggtatagattttattcaattagaatcagcattaagacaaaacatcaatgtagtggtcggcaaagcaagaaatgaacaaattatgattcttggttacgtaaataatacttactttaatcaagcaccaaatttttcatcaaactttaactttcaatttcaaaaacgattaacaaaagatgatatttatttcattgttccagactatttaataccagatgaatgcttacagattcataaaatatatgataactgtatgagtggtaactttgttgtcatgcaaaataaaccaattcaatataatagtgatatagaaattatagaacattatactgatgaattatctgaggttgttttatctagattctcattaattatgcaagcaaaatttagcaaaatatttaaatcagacattaatgatgagtcagttaatcaacttgtatcggaaatatacaacggtgcaccatttgttaaaatgtcacctatgtttaacgccgatgatgatatcatagatttaaccagtaatagtgtgattccagcactaactgagatgaaacgcgaataccaaaataaaattagtgaattaagtaactatttaggtattaactcactagcagtggataaggaaagcggtgtttcggacgaagaggcaaaaagcaaccgaggttttaccacatcaaatagtaatatttatttaaaaggtcgtgaaccgattacattcttatcaaaacgttatggtttagatattaaaccgtattacgacgatgaagttacttcagaaatcacaatgatagatacattgtctaatgatgaaagtagtgaatacaatggctagatatacaatgactttatttgattttattaaatcagaattaattaaaaaaggttttaatgaatttgtaaataatgataaattaacgttttatgatgatgaatttcaattcatgcaaaaaatgttgaagtttgacaaagacgttttagccatcgttaatgaaaaagtgtttaaaggttttaaacttaaagatgacttatctgacttactttttaaaaaatcatttacaatacactttttagatagagaaatcaacagacaaacagttgaagcttttggcatgcaagtgattactgtatgtatcacacatgaggattatttgaatgtggtttattcatcaagcgaagttgaaaaatatctacaatcacaaggttttacagaacataatgaagatacaacaaacaatacagatgaaacctcaaatcaaaatgcaacatctttagacaattcaactggcatgacagcgaacagaaatgcttatgcgtcattaccacaaagcgaggttaacattgatgtagataacacaacgttacgatttgcagataataatacaattgacaacggtaaaactgtgaataaatcaagtaacgaaagtaatcaaaacgcaaaacgtaatcaaaatcaaaaaggtaatgcgaaaggtacacaattttcaaaacagtatttaattgataatattgataaagtatacgatttaagaaagaaaattttaaatgaatttgataaaaaatgttttttacaaatttggtaaaggtggaaaattatggcatataatgaaaacgattttaaatattttgacgacattcgtccatttttagacgaaatatataaaacgagagaacgttacacaccgttttacgatgatagagcagattataataccaattcaaaatcatattatgattatatttcaagattatcaaaactaattgaagtattagcacgtcgtatttgggactatgacaatgaattaaaaaaacgtttcaaaaattgggacgacttaatgaaagcattcccagaccaagcgaaagacttatttagaggttggttaaacgacggtacaatagataaaattattcatgatgaatttactaaatatagtactggtcttacatctgcatttgcattatttaaagttgcagaaatgaaacaaatgaatgattttaaatcagaagttaaagacttaattaaagacattgaccgttttgttaatggttttgaattaaatgagcttgaaccaaagtttgttatgggattcggtggtattcgtaatgctgttaaccaatctataaacatagataaagaaacgaatcaaatgtactctacacaatcagattcacaaaacccagaaggtttttggattaataaattaacgcctagcggtgacttaatttctagtatgcgtattgtacaaggtggtcacggtactacaataggtttagaaagacaatctaacggtgaaatgaaaatatggttacatcatgacggtgtagcaaaactgttacaagtcgcatataaagataattatattttagatttagaagaggctaaagggttaacagattatacaccacagtcacttttaaacaaacacacgtttacaccgttaattgatgaagaaaatgacaaaatcgttttaagattcggtgacgggacaatacaggtacgttcaagagctgacgtaaaaaatcacattgataatgtagaaaaagaaatgacgattgataattcagaaaacaatgataatcgatggatgcaagggattgccgttgatggtgatgatttatactggttaagtggtaacagttcagttaattcacacgttcaaattggtaaatattcattaacaactggtcaaaagatttatgattatccgtttaaattatcatatcaagacggtattaattttccacgtgataactttaaagagccggagggtatttgtatttataccaatccaaaaacaaaacgtaaatcgttattacttgctatgactaatggcggtggtggaaaacgattcaataatttatatgggttctttcaacttggtgagtatgaacactttgaagcattacgtgcgagaggttcacaaaactataaattaacaaaagacgatggacgtgcgttatcaattccagaccatattgacgacttaaatgacttaacacaagcagggttctattatattgacggtggtacagctagtaaacttaaaaatatgccaatgaatggtagtaaaaaaattatagacgctggttgtttcatcaatgtataccctacaacacaaacattaggtacagtacaagaattaacgcgtttttctactggtcgaaaaatggttaaaatcatgcgtggtatgacgctcgatgtatttacattaaaatgggattatggtttatggacaacaatcaaaacagacgcaccatatcaagagtatttagaagcaagtcaatacaataactggatagcttacgttacgacacctggtgaatattatattactggtaaccaaatggaattgtttagagacgcaccagaagaaattaaaaaagtgggtgcatggttacgtgtttcaagtggtaacgctgtcggtgaagtaagacaaacattagaggctaatgtgtccgaacataaagaattctttagtaacgttaatgcagatacaaaaaaacgtcaatatagttgggttaagaaaggataatgtttcatgaaatcacaacaacaagcaaaagaatggatatataagcatgagggtgtaggtgtggactttgatttagcatttggttatcaatgcgctgacttagctgttgcttatatatattacattacagacggtaaagttcgtatgtggggtaacgctaaagacgcaatcaataatgactttaaaggtttagcaatggtgtatgaaaatacaccgaactttaaaccacaattaggggatgttggtgtatatacagatggacaatatggacatattcaatgtgtgttaagtggtaatttagattattatacatgtttagagcaaaactggttaggtggtgggtttgacggttgggaaaaagcaacaataagaacacattattatgacggtgtaacacactttattagacctaaattttctgctagtaacagcaacgaattagaaacatcaaaagtaaacacattcggaaaatggaaacaaaaccaatatggcacatattacagaaatgaaaatgcaacatttacatgtggatttttaccaatatttgcacgtgtaggtagtcctaaattaagtgaacctaatggatattggttccaaccaaatggttatacaccatatgacgaagtttgtttatcagatgggtatgtatggattggttacaactggcaaggtacacgttattatttaccagtaagaaaatggaacggtaaaacgggtaatagttatagtgttggtattccttggggggttttctcataatgggtattttaggttttttctttgagtttagttggaaacgatacaaataagaggtgtgaacaatggctgatagaatcgtaagaagtttaagacaagttgaaacaatagacaggttagcagattttttaacagaagaaaatgacttaatcagtacatcagacggacatatttatgtccgtactgatactggttattataaattaacattttataatgatttaaaaacattgattaataaatacagtggtcaaatagaacatcatgatattgcaattaatgataacaaagaaaaaatatcaacatttctagagaaaataaaaaaattccaaccaatgattgatagtaataaaaaagacattgattcattaaaagaaaaaaatgtcatattaaatgaaagtttagaacaacatcaaacacaattaaatgaatttgaaaaatcaatgttaaagtatgatgataaatatgaaacacttacacaatctttaaacgctactaaagatagtgtaggacgaaacacaaatgaaattaatataattaaatcaaatactggtgcagaaaacattgacgcattaaaaagagaattagctgaagttaaaaaaagtgttaatcttgataaaataaaagacatagaaagtcaaattgaattattaaaatctaaacaaaacaatgacaacacaattcaagaaatacaagaggatattaataagttaaaacaaaattcaagttctgggaaacttgaaagtttagaacaaaccattaatgacatcaaagcaaataccaaccttgataagataaaagagttagaaacaaaattaaacagtattaaccaaaaagattatacacaggatattaattcaattaaatctgacatcgctactttaaaaacaaataatgataaaatatcaaaaattgaaaaagttattcaagaattaaaagacagaccagttgttgacggaaacggtcatattgatttatcaaaatatgataatgatattagtgatttaaaacaaaaaacatcaacaaacgaatcaagtataagcgttttatcaacaaaagtggataacttaaatatagatactaaaattgcacaatctaaatcagaaattgaacaaaattttgatcaaaaaattaacagtgcaaaattacaatttaatgatacaggttggcaagatgtgcaacttgaaagtggtattgttgcaagtgatagcaacgggggttatcccgcaccgcaatatcgtattgtaacaattaatggtgttaaaaccatacaattaaaaggggtattaaaagggattaagaaaaacggtgatattaaattaggtacgattaacgcaaacttaaaatcaacacatcactacacacaatgtgcgattgataataaaatgatgaatacaagattatatttaaactttaataatgaattacattttgttacatcaaattatagcgatagtgacttaacaaatggagataaacgttttgcaatagatacacaaatcattgaataaaaatgttataatagtcgtataaattatttatacgactattttttatggaggtaaaaatgagaaaattaacaaattttaaatttttctataacacaccgtttacagactatcaaaatacaattcattttaatagtaataaagagcgtgatgattattttttaaacggtcgtcattttaaatcattagactattccaaacaaccgtataattttatacgtgatagaatggaaatcaatgttgatatgcagtggcatgacgcacaagggattaactacatgacgtttttatcagattttgaggatagacgctattacgcttttgtgaatcaaatcgaatatgtgaatgatgttgtggtaaaaatatattttgtgattgatactattatgacgtatacacaaggtaatgtattagaacaactttcaaacgttaatattgaacgtcaacacttatcaaagcgtacgtataactatatgttgccgatgttacgtaacaatgatgatgtgttaaaagtatcaaataaaaactatgtgtataaccaaatgcaacagtatttggaaaatttagtgttattccagtcaagcgctgatttatcaaagaaatttggtacgaaaaaagagccaaacttagatacgtctaaaggtacgatatatgacaatatcacatcgccagtcaacttatacgttatggaatatggtgactttattaactttatggataaaatgagtgcatatccatggattacacaaaactttcaaaaggttcaaatgttacctaaagattttattaatacaaaagatttagaggacgttaagacaagtgaaaaaattactggattaaagacattaaaacagggtggaaaatcaaaagaatggagtttaaacgatttatcattaagtttcacaaagcttcaagagatgatgttgtctaaaaaagacgagtttaaacatatgatacgtaatgagtacatgacgattgaattttatgactggaacggtaacacaatgttacttgacgctggtaaaatttcacaaaaaacaggtgttaagttacgtacaaaatccatcattggttatcataatgaagtgcgagtatatccagttgattataacagtgctgaaaacgatagaccgatacttgctaaaaataaagatatattaattgatacaggttcattcttaaataccaatataacatttaatagttttgcgcaagtgcctatattaattaataacggaattttaggacaatcacaacaagccaatagacagcgtaatgcagaaagtcaattaatcacaagtcgtatagataatgtattaaatggtagtgacccaaaatcacgtttttatgacgctgtaagtgtagcaagtaatttaagtccaaccgctttatttggtaagtttaatgaagaatataatttctacaaacaacaacaggcagaatataaagatttagccttacaaccaccatctgtgacagaatcagaaatgggaaacgcattccaaattgcaaatagcattaacggtttaacgatgaaaattagtgtaccgtcacctaaagaaattacatttttacaaaaatattatatgttgtttggttttgaagtaaatgactataatacattcattgaacctattaacagcatgactgtatgcaactatttaaaatgtacaggtacgtataccatacgtgacattgaccctatgttaatggaacaattaaaagcaattttagaatctggtgtgagattttggcataatgacggttcaggtaatccaatgttacagaacccgttaaataataaatttagagaaggtgtataaaatgaatgaggtaaaattaagatttacggacacagaagcatttcatatgttcatatatgcaggtgatttaaagttactatattttttatttgttttgatgattatagatgttgttactggttttgctaaagcaattaaaaataataatctatggtctaaaaaatcaatgaaaggttttgctaaaaaattattgatattctgtattatcattttagctaacatcattgaccagattttacaattaaaaggtggtttactcatgattacgattttctattatatcgcaaatgagggactatctattgttgaaaattgtgctgaaatggacgtattagtgcctgaacaaattaaagataaattaagagtaattaaaaacgattctgaaaagggtgataataatgaacgaccaagagaagatagataaatttacgcattcgtatattaatgatgatttcggtttaacgatagaccagttagtccctaaagtaaaagggtatggacgctttaatgtatggctaggtggtaatgaaagtaaaatcagacaagtattaaaagcagtaaaagagataggtgtgtcacctactctttttgctgtatatgaaaaaaatgaagggtatagcgctggtttaggttggttgaaccatacatctgcacgaggtgactatttaacagacgctaaattcattgcaagaaaattagtatcacaatcaaaacaagcaggacaaccgtcttggtatgacgcaggtaacatcgttcactttgtacctcaagacgtacaaagaaaaggtaatgcagattttgctaaaaatatgaaagcaggtacaatcggacgtgcgtatattccattaacagcagcggctacttgggcggcatattatcccctaggtttgaaagcgtcatataataaagtacaaaactatggtaatccttttttagacggtgcaaatactattttagcatggggtggtaaattagacggtaaaggtggttcacctagtgattcgtctgacagtggtagtagtggtgacagtggtagttcactgctcgctttagcaaaacaagccatgcaagaattattaaaaaaagtacaagacgcattacaatgggatgtacacagtattggtagtgataaattttttagtaatgattattttacattacaaaaaacatttaacaacacatatcatattaaaatgacgattgggctacttgattcattaaaaaaactgattgatagtgtgcaagtagatagtggggatagtagttcaaaccctactgatgatgacggggaccataaaccaattagtggtaagtcagtcaaaccaaatggtaaaagtggacgcgtcattggtggtaactggacgtatgcacagttaccagaaaaatataaaaaagcaattggtgtacctttattcaaaaaagaatacttgtacaaaccaggtaacatatttcctcaaacgggtaatgcaggacaatgtacagaattaacatgggcatatatgtcacaattacatggtaaaagacaaccaacagacgacggtcaaataacaaacggtcaacgtgtgtggtacgtatataaaaagttaggtgcaaaaacaacacataatccaacagtagggtatggtttttcaagtaaaccaccatacttacaagcaacagcatatggcattggtcacacaggtgtcgttgtagcagtatttgacgatggttcattcttagtagcaaactataacgtcccaccatacgtggcaccgtcacgggttgtattatatacattgattaatggtgtacctcataacgctggtgataatattgtattcttcagtggtattgcttaattaactatgctataatgaaaacatgctagtaatgctagtaaataaaatacaaaacataatcaattttcgtacacatttttcatgttatatcaaaagaaaaaggcgactgttatttaacagttgcctttttttaattcatcgtgttcacgttttaatatatgcaaattagatttattatgcactgaacgtacaactggaaataagtcattaagtgagaatgaaccgatgtcactttcaatataaagaatatcatcaaattgactatggtcaaaattttctctagcgtcttttaagataaattcacgtttcatattaagttcatcagtaaaatattcatcatatacattaccgcatacaatttctgttttagacggataaatcgatatcgtaccctgttcgttatagatacttttattgttttctattatcacaccgtcaaagaattgttcacgtacaaaggtttcaaaatcgacgcttgtatcaaaggcgcttttcggtataccagcagaagcaattttaatctttccattcacttcatatgcatattttttatgattcagtacaaacatcttatctatctgttcgttttcaatatcccatttacctaaggctatcgggtcgaataaactggggttcaataagggtttaacaacggatttcatatacaaactatcagtatcgcaataaataaaattgtcgtcaatttcattttcagttaagtattggaaaggtaccaataagttatataatgaacgtgatgtgacaaatgtagagaataatatattacgttcagtgtttttgtaaccgttaatgatattatatagttcgttgttatcatctaaacggaataagttaaaatgtgaacgtaatgcaggtatgccatataatccgttaagtacaactttagacaacataacctcctcatttgagtaagggtgttcgttgatgtcatcagtaatatgatagtcgtaaggtgatgtcatgttgattttgttttttaacttaccttgtgttttaataaaatagttttgaaatataatatcacgtgcatgaaagtattcacattcatatatcacaaacgaattaacacgtatatgcgtgcaatcaatacccgtaatgtcttgaatcattcttaatgtatttgtattaatattaacgtaatcattatcattattatagtattttacaatcatttgacgtaatacacgtgatttgattttaattaataaatcattgttaaatacatctttatcaatcttatataatgaaaaataattgtcatcatctaaaaaagtagggattaatgtaggttctgaataatgttcataaaagtataaccatgtcggaattttctcatgatacatcacataaggataactggaattgatatcaatagaaaaacaaggctcatcaataagtttgtttatgtatttagtgttatacatatttaaaccaccacgataaaatgatttgatataatcataaaaattcatatcatggaaatgataatgtgtatatgatattttaatatcttgatattgattgagtaactgaaaacgcgtcatttgattatttaaatacgattccataatattcaatgaaaatgttaatttgttatagtcaaaatttggaaatatatcactataatgaatatggcacatacctaatataataacgtcattatgaatgtatgtaagttgttcaggtgtgagtttagcaaaacactttacggcatagtcataggcttcactatctgacatgtcgttatctttatcaaatatcgtgtaattaaaatctgttttaagttggtcgtctgttaaataaccaccgtcaagcaactttttacctaatgttgcaattgatgtatttgttttcataaagttatcaataatattaaatttaaatccatttaaaaacattgttaagtctaaattaatagacgatttcacacgtttttctaaaatcacattttgatttttagctaaaatagtagcctcttgcatctttagtgtgtgttcgttttcttctgcagattttaaatatatattttcacgtgtgatattatcaaaataacgcatggtatctttaagtaaaaaatggttgtcatacttattacagttatgtgcaatcatgataatatctgtttttgacttagtgattgtatcacgtcgtttcacatacgtataaaatgcgtcataaaacgattcaaaactaggaaatacttctacatcaatctcataaccattaaaccaaccaattgctactgaatacgttacgtttttatatttggttggtttttttcgtccgttaactttattgtacgctaatgtttctatatcccagtataaaatcattcgacgttcatgtttatgatattgcatgcattctagtaatcccataatcttacacaccttttataagccgtattgtttcattaaatacttctttgtattttcaatatagttatcttcatatattttttcttttctttcaaattcactcatatttttcttcatttcattttttatatgaaattttataattttattcatatctaaatataaatatctatcattatcaacaacgtaattttttgagtaagcgttatcaaaatgtaaattgcttggattgtaataataacgctccatgttttctttataaaacatatcttctcttaaataaataacattgtcatctatatctttgattttagtacaaaattcatattgttttgtataaggtataacaataatattagcattaaatgtatcaacattatacataatttttatatatttatcgtcagttttaatatagaaaaaatcaccgttttgattgatatgatttcttaaattatcatctgccaaattatattcgttaaattcaaactcgccagtagtcatagcgtcatcgtttgaattgaatgcccgtgtgttacgcttttcatttacgtaatcgtttcttcgcatttctaaaaaaatgtttttgtaaagtcgtgatgtgttcattttatgtttttgtaataagttatatatatttaaattggataatataggacttgaaaagttgactgcattacctagtaaaaacattttaggaaagccaatataatcaacattaccatggttacggtcgattgattcataaattgtttttaacttatcccactcgtcaattaaatagtcatcttcaagtgctaaaaattcatcatatataatgatagggtagtgttttaaaaagttagaatgatattttaaatcagttgcactattcaaatctgtaatcacaccgatttccttatcttgatagatgatagctaaatagtccctagcgcttctgaatgtgacacgcttagatttgaatagtgggtttttgtctatgatttcctcaataaaatcacgataagcgtcacgtaatgtataatgacgtgataataaagtaaatttaatatcaagttttatagctaaataaataaagaatgaaacatagttgaacgattttccgtcagaacggtttgaaatagatatgtaatagtctatatcatcattcatgagttcatcaactaattctatttgattatagttatctggtattttttttctgacatgattgacagcattttgataatctcttaccatgtctaaacgattttgtttcaccatgtttttgctccttataatagtttatgatgtcgtttacagtattaaaattactcttcaaatgttgcataatataaaaagttatacctcacatctttatcatcaatagtagtcactggtctgtctgatttaccaatttctttgtataaagtgtcaatttctttaatatatttatacatagaagaattattatttttagcttgtaattcatataaagcatatttatgttttttagcgtttttattattagattcatctttacggttatatatttcaagtatatagtttaattgttcatgtcttttacctcttaccaatgatacggcatttgcatatgacacgtttctttcttttggaaaatagggcaaatgtgcgaaatgtttccatgtgtctatgtacgcctcttgtaaatctttatcatcaaatttaaaattaacagtactaaaatcatttaaaaacaattctttttcctgctcttttcttgcgtctctttcttttttccatttatccatttcggacgtatgtctaaccattgctaacgacctccatataacccatatataaccactaaaaagataatgtagaatataatcaatgtagtaaataaaacaccaaatgacacacgtatatgcattgtcataagtattacaagtgtaattaaaaatgctaaaaggaaaataatagctatgtttaatatattagtcatgttctatcacgttcccgttattatatatcactttgttttgaaaaattattgttatattactttctattggtttctcgaaatattctaatacgtcatcaatagtacaatccataaaaacttcttttttatataatgggtttaaatgttctcgataaaaaacctcaagacaactaaaactatatgtacgaacatcaacgtcaatgtctaaagtaaataaatcattgtattttgtatcactatcatagtattcaatagaaatttcaccgtatctaacaaaaacaacacattttccacttagtgattcaaattttgttattttattcataaaacaatctctattatctaaaatataattaattaatttttttgtgtttaatattgttgtaatattcattttatatctccttaatgtattttacacaaagattatatgcaccttttttgtaaaagtttgcgtcaaaataactatatattaccttaactttatttattttttcgaattgttcaatttcatgttcatatgtttcattaattgatacattgtataataatacggcagtgtatattttttccattgtttagcacctcataaaaataggggataaatatcccctataaaattgtattaaaatgatactggaccaaagttgattgagtaacctttttgaccttttttgttttcatattcataaattgtaaattgcacttcaccagcattgataatgttaacaacgtcctcgtcttgacgcatgtctttaattaattcagttaagtgattcggtaagtttacgttatagtcgtcagtgacgataacaccttgttcaccgaattttgattctttgtttgtgaataatgctctaacgatatactcttttttcataccgtatttttctactaattctgatagtttaataaattctctttctttttcctcaaattcaaatctcgctaatgtgttttggtgtcttgataaaatatcttttacgtttgtcatttttatttctcctcttatttaaattatttgctttctggaattgaaatttgtagtaaatcattgtaataaacttgaattgttttcgttgtgcgtgtagtggataaaagtttgtgtgaattaggtaataaatcttttgcttgtgtttttgataaatgatactcatgaagtggaataaattcttcaacatattcatttttatcatctaaatagtgaagaatataacctttaattcgtaatgtaacaatatcatcaggtttcattattatatcactcctttctaaaaaacgtaaacgttatacgtttcataaaatcctttgtgcatattccattgttctattgggtcatcaccagcaatgtaagataaaatagattctggtttagtttcgttgtttagttcatcatttaagaattgaacaacagaactattatagtttaataatagttgttggcaagccgatactaagttaattgcattgtcgaaagtataagctggattccattgaataagtttattgaatagttgcaacatttcagtatatgcttgacctttttctgcaggtgcattatcaacattaaccattattatcactccttaaatcattgatttcattccttaattcatcaacgatttttttaggtgaattatggtctaattgttcaaaatcgtccttttcaagtacaaataatgttaattcataagttgatgtattacccataacaataactatattaccattttttaaaatgtaagtttgtaaaggttgtacattttccattttgttacctccttgatttgattacatacatagtatagcaaacgtttaaaagttttgtcaatggtttttcttaaaaagtttaaataatttaaaaatactatttaatagaagaaattagattttaaatacaaatcataattttgaataaaagtcaatagatacatatattttgtattttatgaatatgttataggtttgataagttggaaaagtagaagcacagtttttataagtttagtaaagaaatgataagttaatttataagttttgatttgtataatcgtttattttaaacggtggggaggtgtaattttacaaaaactttttccctatt

SEQ ID NO: 108 - DNA, 18128 bp, Rosenblumvirus sp.
  source 1..18128: mol_type = genomic DNA
aattacacctccccaccgtttaaaataaacgattatacaaatcaaaacttataaattaacttatcatttctttactaaacttataaaaactgtgcttctacttttccaacttatcaaacctataacatattcataaaatacaaaatatatgtatctattgacttttattcaaaattatgatttgtatttaaaatctaatttcttctattaaatagtatttttaaattatttaaactttttaagaaaaaccattgacaaaacttttaaacgtttgctatactatgtatgtaatcaaatcaaggaggtaacaaaatggaaaatgtacaacctttacaaacttacattttaaaaaatggtaatatagttattgttatgggtaatacatcaacttatgaattaacattatttgtacttgaaaaggacgattttgaacaattagaccataattcacctaaaaaaatcgttgatgaattaaggaatgaaatcaatgatttaaggagtgataataatggttaatgttgataatgcacctgcagaaaaaggtcaagcatatactgaaatgttgcaactattcaataaacttattcaatggaatccagcttatactttcgacaatgcaattaacttagtatcggcttgccaacaactattattaaactataatagttctgttgttcaattcttaaatgatgaactaaacaacgaaactaaaccagaatctattttatcttacattgctggtgatgacccaatagaacaatggaatatgcacaaaggattttatgaaacgtataacgtttacgttttttagaaaggagtgatataataatgaaacctgatgatattgttacattacgaattaaaggttatattcttcactatttagatgataaaaatgaatatgttgaagaatttattccacttcatgagtatcatttatcaaaaacacaagcaaaagatttattacctaattcacacaaacttttatccactacacgcacaacgaaaacaattcaagtttattacaatgatttactacaaatttcaattccagaaagcaaataatttaaataagaggagaaataaaaatgacaaacgtaaaagatattttatcaagacaccaaaacacattagcgagatttgaatttgaggaaaaagaaagagaatttattaaactatcagaattagtagaaaaatacggtatgaaaaaagagtatatcgttagagcattattcacaaacaaagaatcaaaattcggtgaacaaggtgttatcgtcactgacgactataacgtaaacttaccgaatcacttaactgaattaattaaagacatgcgtcaagacgaggacgttgttaacattatcaatgctggtgaagtgcaatttacaatttatgaatatgaaaacaaaaaaggtcaaaaaggttactcaatcaactttggtccagtatcattttaatacaattttataggggatatttatcccctatttttatgaggtgctaaacaatggaaaaaatatacactgccgtattattatacaatgtatcaattaatgaaacatatgaacatgaaattgaacaattcgaaaaaataaataaagttaaggtaatatatagttattttgacgcaaacttttacaaaaaaggtgcatataatctttgtgtaaaatacattaaggagatataaaatgaatattacaacaatattaaacacaaaaaaattaattaattatattttagataatagagattgttttatgaataaaataacaaaatttgaatcactaagtggaaaatgtgttgtttttgttagatacggtgaaatttctattgaatactatgatagtgatacaaaatacaatgatttatttactttagacattgacgttgatgttcgtacatatagttttagttgtcttgaggttttttatcgagaacatttaaacccattatataaaaaagaagtttttatggattgtactattgatgacgtattagaatatttcgagaaaccaatagaaagtaatataacaataatttttcaaaacaaagtgatatataataacgggaacgtgatagaacatgactaatatattaaacatagctattattttccttttagcatttttaattacacttgtaatacttatgacaatgcatatacgtgtgtcatttggtgttttatttactacattgattatattctacattatctttttagtggttatatatgggttatatggaggtcgttagcaatggttagacatacgtccgaaatggataaatggaaaaaagaaagagacgcaagaaaagagcaggaaaaagaattgtttttaaatgattttagtactgttaattttaaatttgatgataaagatttacaagaggcgtacatagacacatggaaacatttcgcacatttgccctattttccaaaagaaagaaacgtgtcatatgcaaatgccgtatcattggtaagaggtaaaagacatgaacaattaaactatatacttgaaatatataaccgtaaagatgaatctaataataaaaacgctaaaaaacataaatatgctttatatgaattacaagctaaaaataataattcttctatgtataaatatattaaagaaattgacactttatacaaagaaattggtaaatcagacagaccagtgactactattgatgataaagatgtgaggtataactttttatattatgcaacatttgaagagtaattttaatactgtaaacgacatcataaactattataaggagcaaaaacatggtgaaacaaaatcgtttagacatggtaagagattatcaaaatgctgtcaatcatgtcagaaaaaaaataccagataactataatcaaatagaattagttgatgaactcatgaatgatgatatagactattacatatctatttcaaaccgttctgacggaaaatcgttcaactatgtttcattctttatttatttagctataaaacttgatattaaatttactttattatcacgtcattatacattacgtgacgcttatcgtgattttattgaggaaatcatagacaaaaacccactattcaaatctaagcgtgtcacattcagaagcgctagggactatttagctatcatctatcaagataaggaaatcggtgtgattacagatttgaatagtgcaactgatttaaaatatcattctaactttttaaaacactaccctatcattatatatgatgaatttttagcacttgaagatgactatttaattgacgagtgggataagttaaaaacaatttatgaatcaatcgaccgtaaccatggtaatgttgattatattggctttcctaaaatgtttttactaggtaatgcagtcaacttttcaagtcctatattatccaatttaaatatatataacttattacaaaaacataaaatgaacacatcacgactttacaaaaacatttttttagaaatgcgaagaaacgattacgtaaatgaaaagcgtaacacacgggcattcaattcaaacgatgacgctatgactactggcgagtttgaatttaacgaatataatttggcagatgataatttaagaaatcatatcaatcaaaacggtgattttttctatattaaaactgacgataaatatataaaaattatgtataatgttgatacatttaatgctaatattattgttataccttatacaaaacaatatgaattttgtactaaaatcaaagatatagatgacaatgttatttatttaagagaagatatgttttataaagaaaacatggagcgttattattacaatccaagcaatttacattttgataacgcttactcaaaaaattacgttgttgataatgatagatatttatatttagatatgaataaaattataaaatttcatataaaaaatgaaatgaagaaaaatatgagtgaatttgaaagaaaagaaaaaatatatgaagataactatattgaaaatacaaagaagtatttaatgaaacaatacggcttataaaaggtgtgtaagattatgggattactagaatgcatgcaatatcataaacatgaacgtcgaatgattttatactgggatatagaaacattagcgtacaataaagttaacggacgaaaaaaaccaaccaaatataaaaacgtaacgtattcagtagcaattggttggtttaatggttatgagattgatgtagaagtatttcctagttttgaatcgttttatgacgcattttatacgtatgtgaaacgacgtgatacaatcactaagtcaaaaacagatattatcatgattgcacataactgtaataagtatgacaaccattttttacttaaagataccatgcgttattttgataatatcacacgtgaaaatatatatttaaaatctgcagaagaaaacgaacacacactaaagatgcaagaggctactattttagctaaaaatcaaaatgtgattttagaaaaacgtgtgaaatcgtctattaatttagacttaacaatgtttttaaatggatttaaatttaatattattgataactttatgaaaacaaatacatcaattgcaacattaggtaaaaagttgcttgacggtggttatttaacagacgaccaacttaaaacagattttaattacacgatatttgataaagataacgacatgtcagatagtgaagcctatgactatgccgtaaagtgttttgctaaactcacacctgaacaacttacatacattcataatgacgttattatattaggtatgtgccatattcattatagtgatatatttccaaattttgactataacaaattaacattttcattgaatattatggaatcgtatttaaataatcaaatgacgcgttttcagttactcaatcaatatcaagatattaaaatatcatatacacattatcatttccatgatatgaatttttatgattatatcaaatcattttatcgtggtggtttaaatatgtataacactaaatacataaacaaacttattgatgagccttgtttttctattgatatcaattccagttatccttatgtgatgtatcatgagaaaattccgacatggttatacttttatgaacattattcagaacctacattaatccctacttttttagatgatgacaattatttttcattatataagattgataaagatgtatttaacaatgatttattaattaaaatcaaatcacgtgtattacgtcaaatgattgtaaaatactataataatgataatgattacgttaatattaatacaaatacattaagaatgattcaagacattacgggtattgattgcacgcatatacgtgttaattcgtttgtgatatatgaatgtgaatactttcatgcacgtgatattatatttcaaaactattttattaaaacacaaggtaagttaaaaaacaaaatcaacatgacatcaccttacgactatcatattactgatgacatcaacgaacacccttactcaaatgaggaggttatgttgtctaaagttgtacttaacggattatatggcatacctgcattacgttcacattttaacttattccgtttagatgataacaacgaactatataatatcattaacggttacaaaaacactgaacgtaatatattattctctacatttgtcacatcacgttcattatataacttattggtacctttccaatacttaactgaaaatgaaattgacgacaattttatttattgcgatactgatagtttgtatatgaaatccgttgttaaacccttattgaaccccagtttattcgacccgatagccttaggtaaatgggatattgaaaacgaacagatagataagatgtttgtactgaatcataaaaaatatgcatatgaagtgaatggaaagattaaaattgcttctgctggtataccgaaaagcgcctttgatacaagcgtcgattttgaaacctttgtacgtgaacaattctttgacggtgtgataatagaaaacaataaaagtatctataacgaacagggtacgatatcgatttatccgtctaaaacagaaattgtatgcggtaatgtatatgatgaatattttactgatgaacttaatatgaaacgtgaatttatcttaaaagacgctagagaaaattttgaccatagtcaatttgatgatattctttatattgaaagtgacatcggttcattctcacttaatgacttatttccagttgtacgttcagtgcataataaatctaatttgcatatattaaaacgtgaacacgatgaattaaaaaaaggcaactgttaaataacagtcgcctttttcttttgatataacatgaaaaatgtgtacgaaaattgattatgttttgtattttatttactagcattactagcatgttttcattatagcatagttaattaagcaataccactgaagaatacaatattatcaccagcgttatgaggtacaccattaatcaatgtatataatacaacccgtgacggtgccacgtatggtgggacgttatagtttgctactaagaatgaaccatcgtcaaatactgctacaacgacacctgtgtgaccaatgccatatgctgttgcttgtaagtatggtggtttacttgaaaaaccataccctactgttggattatgtgttgtttttgcacctaactttttatatacgtaccacacacgttgaccgtttgttatttgaccgtcgtctgttggttgtcttttaccatgtaattgtgacatatatgcccatgttaattctgtacattgtcctgcattacccgtttgaggaaatatgttacctggtttgtacaagtattcttttttgaataaaggtacaccaattgcttttttatatttttctggtaactgtgcatacgtccagttaccaccaatgacgcgtccacttttaccatttggtttgactgacttaccactaattggtttatggtccccgtcatcatcagtagggtttgaactactatccccactatctacttgcacactatcaatcagtttttttaatgaatcaagtagcccaatcgtcattttaatatgatatgtgttgttaaatgttttttgtaatgtaaaataatcattactaaaaaatttatcactaccaatactgtgtacatcccattgtaatgcgtcttgtactttttttaataattcttgcatggcttgttttgctaaagcgagcagtgaactaccactgtcaccactactaccactgtcagacgaatcactaggtgaaccacctttaccgtctaatttaccaccccatgctaaaatagtatttgcaccgtctaaaaaaggattaccatagttttgtactttattatatgacgctttcaaacctaggggataatatgccgcccaagtagccgctgctgttaatggaatatacgcacgtccgattgtacctgctttcatatttttagcaaaatctgcattaccttttctttgtacgtcttgaggtacaaagtgaacgatgttacctgcgtcataccaagacggttgtcctgcttgttttgattgtgatactaattttcttgcaatgaatttagcgtctgttaaatagtcacctcgtgcagatgtatggttcaaccaacctaaaccagcgctatacccttcatttttttcatatacagcaaaaagagtaggtgacacacctatctcttttactgcttttaatacttgtctgattttactttcattaccacctagccatacattaaagcgtccatacccttttactttagggactaactggtctatcgttaaaccgaaatcatcattaatatacgaatgcgtaaatttatctatcttctcttggtcgttcattattatcacccttttcagaatcgtttttaattactcttaatttatctttaatttgttcaggcactaatacgtccatttcagcacaattttcaacaatagatagtccctcatttgcgatataatagaaaatcgtaatcatgagtaaaccaccttttaattgtaaaatctggtcaatgatgttagctaaaatgataatacagaatatcaataattttttagcaaaacctttcattgattttttagaccatagattattatttttaattgctttagcaaaaccagtaacaacatctataatcatcaaaacaaataaaaaatatagtaactttaaatcacctgcatatatgaacatatgaaatgcttctgtgtccgtaaatcttaattttacctcattcattttatacaccttctctaaatttattatttaacgggttctgtaacattggattacctgaaccgtcattatgccaaaatctcacaccagattctaaaattgcttttaattgttccattaacatagggtcaatgtcacgtatggtatacgtacctgtacattttaaatagttgcatacagtcatgctgttaataggttcaatgaatgtattatagtcatttacttcaaaaccaaacaacatataatatttttgtaaaaatgtaatttctttaggtgacggtacactaattttcatcgttaaaccgttaatgctatttgcaatttggaatgcgtttcccatttctgattctgtcacagatggtggttgtaaggctaaatctttatattctgcctgttgttgtttgtagaaattatattcttcattaaacttaccaaataaagcggttggacttaaattacttgctacacttacagcgtcataaaaacgtgattttgggtcactaccatttaatacattatctatacgacttgtgattaattgactttctgcattacgctgtctattggcttgttgtgattgtcctaaaattccgttattaattaatataggcacttgcgcaaaactattaaatgttatattggtatttaagaatgaacctgtatcaattaatatatctttatttttagcaagtatcggtctatcgttttcagcactgttataatcaactggatatactcgcacttcattatgataaccaatgatggattttgtacgtaacttaacacctgttttttgtgaaattttaccagcgtcaagtaacattgtgttaccgttccagtcataaaattcaatcgtcatgtactcattacgtatcatatgtttaaactcgtcttttttagacaacatcatctcttgaagctttgtgaaacttaatgataaatcgtttaaactccattcttttgattttccaccctgttttaatgtctttaatccagtaattttttcacttgtcttaacgtcctctaaatcttttgtattaataaaatctttaggtaacatttgaaccttttgaaagttttgtgtaatccatggatatgcactcattttatccataaagttaataaagtcaccatattccataacgtataagttgactggcgatgtgatattgtcatatatcgtacctttagacgtatctaagtttggctcttttttcgtaccaaatttctttgataaatcagcgcttgactggaataacactaaattttccaaatactgttgcatttggttatacacatagtttttatttgatacttttaacacatcatcattgttacgtaacatcggcaacatatagttatacgtacgctttgataagtgttgacgttcaatattaacgtttgaaagttgttctaatacattaccttgtgtatacgtcataatagtatcaatcacaaaatatatttttaccacaacatcattcacatattcgatttgattcacaaaagcgtaatagcgtctatcctcaaaatctgataaaaacgtcatgtagttaatcccttgtgcgtcatgccactgcatatcaacattgatttccattctatcacgtataaaattatacggttgtttggaatagtctaatgatttaaaatgacgaccgtttaaaaaataatcatcacgctctttattactattaaaatgaattgtattttgatagtctgtaaacggtgtgttatagaaaaatttaaaatttgttaattttctcatttttacctccataaaaaatagtcgtataaataatttatacgactattataacatttttattcaatgatttgtgtatctattgcaaaacgtttatctccatttgttaagtcactatcgctataatttgatgtaacaaaatgtaattcattattaaagtttaaatataatcttgtattcatcattttattatcaatcgcacattgtgtgtagtgatgtgttgattttaagtttgcgttaatcgtacctaatttaatatcaccgtttttcttaatcccttttaataccccttttaattgtatggttttaacaccattaattgttacaatacgatattgcggtgcgggataacccccgttgctatcacttgcaacaataccactttcaagttgcacatcttgccaacctgtatcattaaattgtaattttgcactgttaattttttgatcaaaattttgttcaatttctgatttagattgtgcaattttagtatctatatttaagttatccacttttgttgataaaacgcttatacttgattcgtttgttgatgttttttgttttaaatcactaatatcattatcatattttgataaatcaatatgaccgtttccgtcaacaactggtctgtcttttaattcttgaataactttttcaatttttgatattttatcattatttgtttttaaagtagcgatgtcagatttaattgaattaatatcctgtgtataatctttttggttaatactgtttaattttgtttctaactcttttatcttatcaaggttggtatttgctttgatgtcattaatggtttgttctaaactttcaagtttcccagaacttgaattttgttttaacttattaatatcctcttgtatttcttgaattgtgttgtcattgttttgtttagattttaataattcaatttgactttctatgtcttttattttatcaagattaacactttttttaacttcagctaattctctttttaatgcgtcaatgttttctgcaccagtatttgatttaattatattaatttcatttgtgtttcgtcctacactatctttagtagcgtttaaagattgtgtaagtgtttcatatttatcatcatactttaacattgatttttcaaattcatttaattgtgtttgatgttgttctaaactttcatttaatatgacatttttttcttttaatgaatcaatgtcttttttattactatcaatcattggttggaatttttttattttctctagaaatgttgatattttttctttgttatcattaattgcaatatcatgatgttctatttgaccactgtatttattaatcaatgtttttaaatcattataaaatgttaatttataataaccagtatcagtacggacataaatatgtccgtctgatgtactgattaagtcattttcttctgttaaaaaatctgctaacctgtctattgtttcaacttgtcttaaacttcttacgattctatcagccattgttcacacctcttatttgtatcgtttccaactaaactcaaagaaaaaacctaaaatacccattatgagaaaaccccccaaggaataccaacactataactattacccgttttaccgttccattttcttactggtaaataataacgtgtaccttgccagttgtaaccaatccatacatacccatctgataaacaaacttcgtcatatggtgtataaccatttggttggaaccaatatccattaggttcacttaatttaggactacctacacgtgcaaatattggtaaaaatccacatgtaaatgttgcattttcatttctgtaatatgtgccatattggttttgtttccattttccgaatgtgtttacttttgatgtttctaattcgttgctgttactagcagaaaatttaggtctaataaagtgtgttacaccgtcataataatgtgttcttattgttgctttttcccaaccgtcaaacccaccacctaaccagttttgctctaaacatgtataataatctaaattaccacttaacacacattgaatatgtccatattgtccatctgtatatacaccaacatcccctaattgtggtttaaagttcggtgtattttcatacaccattgctaaacctttaaagtcattattgattgcgtctttagcgttaccccacatacgaactttaccgtctgtaatgtaatatatataagcaacagctaagtcagcgcattgataaccaaatgctaaatcaaagtccacacctacaccctcatgcttatatatccattcttttgcttgttgttgtgatttcatgaaacattatcctttcttaacccaactatattgacgtttttttgtatctgcattaacgttactaaagaattctttatgttcggacacattagcctctaatgtttgtcttacttcaccgacagcgttaccacttgaaacacgtaaccatgcacccacttttttaatttcttctggtgcgtctctaaacaattccatttggttaccagtaatataatattcaccaggtgtcgtaacgtaagctatccagttattgtattgacttgcttctaaatactcttgatatggtgcgtctgttttgattgttgtccataaaccataatcccattttaatgtaaatacatcgagcgtcataccacgcatgattttaaccatttttcgaccagtagaaaaacgcgttaattcttgtactgtacctaatgtttgtgttgtagggtatacattgatgaaacaaccagcgtctataatttttttactaccattcattggcatatttttaagtttactagctgtaccaccgtcaatataatagaaccctgcttgtgttaagtcatttaagtcgtcaatatggtctggaattgataacgcacgtccatcgtcttttgttaatttatagttttgtgaacctctcgcacgtaatgcttcaaagtgttcatactcaccaagttgaaagaacccatataaattattgaatcgttttccaccaccgccattagtcatagcaagtaataacgatttacgttttgtttttggattggtataaatacaaataccctccggctctttaaagttatcacgtggaaaattaataccgtcttgatatgataatttaaacggataatcataaatcttttgaccagttgttaatgaatatttaccaatttgaacgtgtgaattaactgaactgttaccacttaaccagtataaatcatcaccatcaacggcaatcccttgcatccatcgattatcattgttttctgaattatcaatcgtcatttctttttctacattatcaatgtgattttttacgtcagctcttgaacgtacctgtattgtcccgtcaccgaatcttaaaacgattttgtcattttcttcatcaattaacggtgtaaacgtgtgtttgtttaaaagtgactgtggtgtataatctgttaaccctttagcctcttctaaatctaaaatataattatctttatatgcgacttgtaacagttttgctacaccgtcatgatgtaaccatattttcatttcaccgttagattgtctttctaaacctattgtagtaccgtgaccaccttgtacaatacgcatactagaaattaagtcaccgctaggcgttaatttattaatccaaaaaccttctgggttttgtgaatctgattgtgtagagtacatttgattcgtttctttatctatgtttatagattggttaacagcattacgaataccaccgaatcccataacaaactttggttcaagctcatttaattcaaaaccattaacaaaacggtcaatgtctttaattaagtctttaacttctgatttaaaatcattcatttgtttcatttctgcaactttaaataatgcaaatgcagatgtaagaccagtactatatttagtaaattcatcatgaataattttatctattgtaccgtcgtttaaccaacctctaaataagtctttcgcttggtctgggaatgctttcattaagtcgtcccaatttttgaaacgtttttttaattcattgtcatagtcccaaatacgacgtgctaatacttcaattagttttgataatcttgaaatataatcataatatgattttgaattggtattataatctgctctatcatcgtaaaacggtgtgtaacgttctctcgttttatatatttcgtctaaaaatggacgaatgtcgtcaaaatatttaaaatcgttttcattatatgccataattttccacctttaccaaatttgtaaaaaacattttttatcaaattcatttaaaattttctttcttaaatcgtatactttatcaatattatcaattaaatactgttttgaaaattgtgtacctttcgcattacctttttgattttgattacgttttgcgttttgattactttcgttacttgatttattcacagttttaccgttgtcaattgtattattatctgcaaatcgtaacgttgtgttatctacatcaatgttaacctcgctttgtggtaatgacgcataagcatttctgttcgctgtcatgccagttgaattgtctaaagatgttgcattttgatttgaggtttcatctgtattgtttgttgtatcttcattatgttctgtaaaaccttgtgattgtagatatttttcaacttcgcttgatgaataaaccacattcaaataatcctcatgtgtgatacatacagtaatcacttgcatgccaaaagcttcaactgtttgtctgttgatttctctatctaaaaagtgtattgtaaatgattttttaaaaagtaagtcagataagtcatctttaagtttaaaacctttaaacactttttcattaacgatggctaaaacgtctttgtcaaacttcaacattttttgcatgaattgaaattcatcatcataaaacgttaatttatcattatttacaaattcattaaaaccttttttaattaattctgatttaataaaatcaaataaagtcattgtatatctagccattgtattcactactttcatcattagacaatgtatctatcattgtgatttctgaagtaacttcatcgtcgtaatacggtttaatatctaaaccataacgttttgataagaatgtaatcggttcacgaccttttaaataaatattactatttgatgtggtaaaacctcggttgctttttgcctcttcgtccgaaacaccgctttccttatccactgctagtgagttaatacctaaatagttacttaattcactaattttattttggtattcgcgtttcatctcagttagtgctggaatcacactattactggttaaatctatgatatcatcatcggcgttaaacataggtgacattttaacaaatggtgcaccgttgtatatttccgatacaagttgattaactgactcatcattaatgtctgatttaaatattttgctaaattttgcttgcataattaatgagaatctagataaaacaacctcagataattcatcagtataatgttctataatttctatatcactattatattgaattggtttattttgcatgacaacaaagttaccactcatacagttatcatatattttatgaatctgtaagcattcatctggtattaaatagtctggaacaatgaaataaatatcatcttttgttaatcgtttttgaaattgaaagttaaagtttgatgaaaaatttggtgcttgattaaagtaagtattatttacgtaaccaagaatcataatttgttcatttcttgctttgccgaccactacattgatgttttgtcttaatgctgattctaattgaataaaatctataccaaccgtatcacgattggtatagttgatgagtagtggtaaaaattccaaataacgattaaacataagacgtttaaatctgttgcgatgttctacaactcttttgttgatttcttttgataattcaacctgtacacctttattatgtttagtcatttatagcacctctattattctgttcttggtgttacatcttggtcagtaattaaaattttattaaagaatgggctaatggctttaaatgaatagtaatgaatccagtgtgtgacttcatcaaattcaccattatagaatggttgttttaacataccttttgtgtaacgtttatatttaattgaattaatatccaaaataaacgcgtataaatctgattttggtttaatttcttcaacattatctttaaactctgatagttttgacacatcataagtgaatactgaaccaactggaattgtatcacctttatgagtttgataatcaccgtaagcacgtaagaaagctactgattcatcacttgatacgacaatatctttagtgactttgaaaacaccacctaggtcgtcaaaactgataacgtggtctgtaaagtcaatccctgctacttggaatgtgttcgcaatctttgtatctaaaagataagattttaagctatcagtcgttaaaataacaatatcttttaattttgaaactgttgtatattgtccgattgcaccacctgaagcacgatgaacttcattatatttagcgctgttgttttgtaagttaagaatagcttcaaaaactttacttgctaaatcttcttttgatgttgctttacgtacatttgattcagataattgattcaatgagtaatcaactaacattgcacgcatttctttttcttctaatacgttaatatcagaaattttctttttatagacacctaatgcataattagtagcgtctgctaatgtttggaaattgaaacgtgtgtcattgttatttaatgtaaatttttgtttcttcacaataccactaccatataacttagtagccatacgtggatagttacgtttcaacattagttcttcatttttagataagtccatgttaataggtactgtatccataattacatattcttcactgtattgacctataaagtcctgctctttagctaaccaattaaaacggttacctaatgcaatatcgattaataacgtttcattaatcttagggaataaaaatttatttacaaatgtttcaaacattgtattagaattatcccacttatcgccaaacgtccatgattttgaataagtatgattaaagtcttgtaatgcagatttagctgactttgcaactaatagtgctgtttcgttttttgtactcttttctgccatgatttattattcctcctcaacatcgccagtaaatgactgttttgaaagtgaatgaatttgtacaccataactatcttcacttttatttgtatcaattgacatattttcatttaattctgttcgtttatttaatcttgaatcttcatatgatgtacccatcatagaacgcatgttgttaccctcgtacatgtttaagttcctcctaatctaaatctaatttatcgacaagttcttcatctgaatagtctttatcattgttatctgtttcttttgattctggttgtggttgtggttgtggttgtggttgttgcatttgtgatgtttcaaaattagtaaatcgttgttctaatgaagcgatacgttgttctaaaacaactgggtctaattttgcacaatcttcatctgttgtagtaggttctaatttgttttcattttcttcttcgattgtttctactgttttatcttcagttgattcttcagttgattcttcagttgattctgaagtttcttcagttgattctgaagtttcttctttgtcgtctggttttacgatttcatcaaattctgtcattttgacacctccaaatattttataactaattatatcatagaatatttaaataagtaaattaaatttattttattttcaaatcataactttgaataaaagtcaatagatacataaattttgtatttaatgaatatgtaataggttagataagttggaaaagtagacgcacagtttttataagtttagtaaagaaatgatatgttaatttataagttttgatttgtataatcgtttattttaaacggtggggaggtgtaaatttacaataactttttcc

SEQ ID NO: 109 - DNA, 18123 bp, Rosenblumvirus sp.
  source 1..18123: mol_type = genomic DNA
agttattgtaaatttacacctccccaccgtttaaaataaacgattatacaaatcaaaacttataaattaacatatcatttctttactaaacttataaaaactgtgcgtctacttttccaacttatctaacctattacatattcattaaatacaaaatttatgtatctattgacttttattcaaagttatgatttgaaaataaaataaatttaatttacttatttaaatattctatgatataattagttataaaatatttggaggtgtcaaaatgacagaatttgatgaaatcgtaaaaccagacgacaaagaagaaacttcagaatcaactgaagaaacttcagaatcaactgaagaatcaactgaagaatcaactgaagataaaacagtagaaacaatcgaagaagaaaatgaaaacaaattagaacctactacaacagatgaagattgtgcaaaattagacccagttgttttagaacaacgtatcgcttcattagaacaacgatttactaattttgaaacatcacaaatgcaacaaccacaaccacaaccacaaccacaaccagaatcaaaagaaacagataacaatgataaagactattcagatgaagaacttgtcgataaattagatttagattaggaggaacttaaacatgtacgagggtaacaacatgcgttctatgatgggtacatcatatgaagattcaagattaaataaacgaacagaattaaatgaaaatatgtcaattgatacaaataaaagtgaagatagttatggtgtacaaattcattcactttcaaaacagtcatttactggcgatgttgaggaggaataataaatcatggcagaaaagagtacaaaaaacgaaacagcactattagttgcaaagtcagctaaatctgcattacaagactttaatcatacttattcaaaatcatggacgtttggcgataagtgggataattctaatacaatgtttgaaacatttgtaaataaatttttattccctaagattaatgaaacgttattaatcgatattgcattaggtaaccgttttaattggttagctaaagagcaggactttataggtcaatacagtgaagaatatgtaattatggatacagtacctattaacatggacttatctaaaaatgaagaactaatgttgaaacgtaactatccacgtatggctactaagttatatggtagtggtattgtgaagaaacaaaaatttacattaaataacaatgacacacgtttcaatttccaaacattagcagacgctactaattatgcattaggtgtctataaaaagaaaatttctgatattaacgtattagaagaaaaagaaatgcgtgcaatgttagttgattactcattgaatcaattatctgaatcaaatgtacgtaaagcaacatcaaaagaagatttagcaagtaaagtttttgaagctattcttaacttacaaaacaacagcgctaaatataatgaagttcatcgtgcttcaggtggtgcaatcggacaatatacaacagtttcaaaattaaaagatattgttattttaacgactgatagcttaaaatcttatcttttagatacaaagattgcgaacacattccaagtagcagggattgactttacagaccacgttatcagttttgacgacctaggtggtgttttcaaagtcactaaagatattgtcgtatcaagtgatgaatcagtagctttcttacgtgcttacggtgattatcaaactcataaaggtgatacaattccagttggttcagtattcacttatgatgtgtcaaaactatcagagtttaaagataatgttgaagaaattaaaccaaaatcagatttatacgcgtttattttggatattaattcaattaaatataaacgttacacaaaaggtatgttaaaacaaccattctataatggtgaatttgatgaagtcacacactggattcattactattcatttaaagccattagcccattctttaataaaattttaattactgaccaagatgtaacaccaagaacagaataatagaggtgctataaatgactaaacataataaaggtgtacaggttgaattatcaaaagaaatcaacaaaagagttgtagaacatcgcaacagatttaaacgtcttatgtttaatcgttatttggaatttttaccactactcatcaactataccaatcgtgatacggttggtatagattttattcaattagaatcagcattaagacaaaacatcaatgtagtggtcggcaaagcaagaaatgaacaaattatgattcttggttacgtaaataatacttactttaatcaagcaccaaatttttcatcaaactttaactttcaatttcaaaaacgattaacaaaagatgatatttatttcattgttccagactatttaataccagatgaatgcttacagattcataaaatatatgataactgtatgagtggtaactttgttgtcatgcaaaataaaccaattcaatataatagtgatatagaaattatagaacattatactgatgaattatctgaggttgttttatctagattctcattaattatgcaagcaaaatttagcaaaatatttaaatcagacattaatgatgagtcagttaatcaacttgtatcggaaatatacaacggtgcaccatttgttaaaatgtcacctatgtttaacgccgatgatgatatcatagatttaaccagtaatagtgtgattccagcactaactgagatgaaacgcgaataccaaaataaaattagtgaattaagtaactatttaggtattaactcactagcagtggataaggaaagcggtgtttcggacgaagaggcaaaaagcaaccgaggttttaccacatcaaatagtaatatttatttaaaaggtcgtgaaccgattacattcttatcaaaacgttatggtttagatattaaaccgtattacgacgatgaagttacttcagaaatcacaatgatagatacattgtctaatgatgaaagtagtgaatacaatggctagatatacaatgactttatttgattttattaaatcagaattaattaaaaaaggttttaatgaatttgtaaataatgataaattaacgttttatgatgatgaatttcaattcatgcaaaaaatgttgaagtttgacaaagacgttttagccatcgttaatgaaaaagtgtttaaaggttttaaacttaaagatgacttatctgacttactttttaaaaaatcatttacaatacactttttagatagagaaatcaacagacaaacagttgaagcttttggcatgcaagtgattactgtatgtatcacacatgaggattatttgaatgtggtttattcatcaagcgaagttgaaaaatatctacaatcacaaggttttacagaacataatgaagatacaacaaacaatacagatgaaacctcaaatcaaaatgcaacatctttagacaattcaactggcatgacagcgaacagaaatgcttatgcgtcattaccacaaagcgaggttaacattgatgtagataacacaacgttacgatttgcagataataatacaattgacaacggtaaaactgtgaataaatcaagtaacgaaagtaatcaaaacgcaaaacgtaatcaaaatcaaaaaggtaatgcgaaaggtacacaattttcaaaacagtatttaattgataatattgataaagtatacgatttaagaaagaaaattttaaatgaatttgataaaaaatgttttttacaaatttggtaaaggtggaaaattatggcatataatgaaaacgattttaaatattttgacgacattcgtccatttttagacgaaatatataaaacgagagaacgttacacaccgttttacgatgatagagcagattataataccaattcaaaatcatattatgattatatttcaagattatcaaaactaattgaagtattagcacgtcgtatttgggactatgacaatgaattaaaaaaacgtttcaaaaattgggacgacttaatgaaagcattcccagaccaagcgaaagacttatttagaggttggttaaacgacggtacaatagataaaattattcatgatgaatttactaaatatagtactggtcttacatctgcatttgcattatttaaagttgcagaaatgaaacaaatgaatgattttaaatcagaagttaaagacttaattaaagacattgaccgttttgttaatggttttgaattaaatgagcttgaaccaaagtttgttatgggattcggtggtattcgtaatgctgttaaccaatctataaacatagataaagaaacgaatcaaatgtactctacacaatcagattcacaaaacccagaaggtttttggattaataaattaacgcctagcggtgacttaatttctagtatgcgtattgtacaaggtggtcacggtactacaataggtttagaaagacaatctaacggtgaaatgaaaatatggttacatcatgacggtgtagcaaaactgttacaagtcgcatataaagataattatattttagatttagaagaggctaaagggttaacagattatacaccacagtcacttttaaacaaacacacgtttacaccgttaattgatgaagaaaatgacaaaatcgttttaagattcggtgacgggacaatacaggtacgttcaagagctgacgtaaaaaatcacattgataatgtagaaaaagaaatgacgattgataattcagaaaacaatgataatcgatggatgcaagggattgccgttgatggtgatgatttatactggttaagtggtaacagttcagttaattcacacgttcaaattggtaaatattcattaacaactggtcaaaagatttatgattatccgtttaaattatcatatcaagacggtattaattttccacgtgataactttaaagagccggagggtatttgtatttataccaatccaaaaacaaaacgtaaatcgttattacttgctatgactaatggcggtggtggaaaacgattcaataatttatatgggttctttcaacttggtgagtatgaacactttgaagcattacgtgcgagaggttcacaaaactataaattaacaaaagacgatggacgtgcgttatcaattccagaccatattgacgacttaaatgacttaacacaagcagggttctattatattgacggtggtacagctagtaaacttaaaaatatgccaatgaatggtagtaaaaaaattatagacgctggttgtttcatcaatgtataccctacaacacaaacattaggtacagtacaagaattaacgcgtttttctactggtcgaaaaatggttaaaatcatgcgtggtatgacgctcgatgtatttacattaaaatgggattatggtttatggacaacaatcaaaacagacgcaccatatcaagagtatttagaagcaagtcaatacaataactggatagcttacgttacgacacctggtgaatattatattactggtaaccaaatggaattgtttagagacgcaccagaagaaattaaaaaagtgggtgcatggttacgtgtttcaagtggtaacgctgtcggtgaagtaagacaaacattagaggctaatgtgtccgaacataaagaattctttagtaacgttaatgcagatacaaaaaaacgtcaatatagttgggttaagaaaggataatgtttcatgaaatcacaacaacaagcaaaagaatggatatataagcatgagggtgtaggtgtggactttgatttagcatttggttatcaatgcgctgacttagctgttgcttatatatattacattacagacggtaaagttcgtatgtggggtaacgctaaagacgcaatcaataatgactttaaaggtttagcaatggtgtatgaaaatacaccgaactttaaaccacaattaggggatgttggtgtatatacagatggacaatatggacatattcaatgtgtgttaagtggtaatttagattattatacatgtttagagcaaaactggttaggtggtgggtttgacggttgggaaaaagcaacaataagaacacattattatgacggtgtaacacactttattagacctaaattttctgctagtaacagcaacgaattagaaacatcaaaagtaaacacattcggaaaatggaaacaaaaccaatatggcacatattacagaaatgaaaatgcaacatttacatgtggatttttaccaatatttgcacgtgtaggtagtcctaaattaagtgaacctaatggatattggttccaaccaaatggttatacaccatatgacgaagtttgtttatcagatgggtatgtatggattggttacaactggcaaggtacacgttattatttaccagtaagaaaatggaacggtaaaacgggtaatagttatagtgttggtattccttggggggttttctcataatgggtattttaggttttttctttgagtttagttggaaacgatacaaataagaggtgtgaacaatggctgatagaatcgtaagaagtttaagacaagttgaaacaatagacaggttagcagattttttaacagaagaaaatgacttaatcagtacatcagacggacatatttatgtccgtactgatactggttattataaattaacattttataatgatttaaaaacattgattaataaatacagtggtcaaatagaacatcatgatattgcaattaatgataacaaagaaaaaatatcaacatttctagagaaaataaaaaaattccaaccaatgattgatagtaataaaaaagacattgattcattaaaagaaaaaaatgtcatattaaatgaaagtttagaacaacatcaaacacaattaaatgaatttgaaaaatcaatgttaaagtatgatgataaatatgaaacacttacacaatctttaaacgctactaaagatagtgtaggacgaaacacaaatgaaattaatataattaaatcaaatactggtgcagaaaacattgacgcattaaaaagagaattagctgaagttaaaaaaagtgttaatcttgataaaataaaagacatagaaagtcaaattgaattattaaaatctaaacaaaacaatgacaacacaattcaagaaatacaagaggatattaataagttaaaacaaaattcaagttctgggaaacttgaaagtttagaacaaaccattaatgacatcaaagcaaataccaaccttgataagataaaagagttagaaacaaaattaaacagtattaaccaaaaagattatacacaggatattaattcaattaaatctgacatcgctactttaaaaacaaataatgataaaatatcaaaaattgaaaaagttattcaagaattaaaagacagaccagttgttgacggaaacggtcatattgatttatcaaaatatgataatgatattagtgatttaaaacaaaaaacatcaacaaacgaatcaagtataagcgttttatcaacaaaagtggataacttaaatatagatactaaaattgcacaatctaaatcagaaattgaacaaaattttgatcaaaaaattaacagtgcaaaattacaatttaatgatacaggttggcaagatgtgcaacttgaaagtggtattgttgcaagtgatagcaacgggggttatcccgcaccgcaatatcgtattgtaacaattaatggtgttaaaaccatacaattaaaaggggtattaaaagggattaagaaaaacggtgatattaaattaggtacgattaacgcaaacttaaaatcaacacatcactacacacaatgtgcgattgataataaaatgatgaatacaagattatatttaaactttaataatgaattacattttgttacatcaaattatagcgatagtgacttaacaaatggagataaacgttttgcaatagatacacaaatcattgaataaaaatgttataatagtcgtataaattatttatacgactattttttatggaggtaaaaatgagaaaattaacaaattttaaatttttctataacacaccgtttacagactatcaaaatacaattcattttaatagtaataaagagcgtgatgattattttttaaacggtcgtcattttaaatcattagactattccaaacaaccgtataattttatacgtgatagaatggaaatcaatgttgatatgcagtggcatgacgcacaagggattaactacatgacgtttttatcagattttgaggatagacgctattacgcttttgtgaatcaaatcgaatatgtgaatgatgttgtggtaaaaatatattttgtgattgatactattatgacgtatacacaaggtaatgtattagaacaactttcaaacgttaatattgaacgtcaacacttatcaaagcgtacgtataactatatgttgccgatgttacgtaacaatgatgatgtgttaaaagtatcaaataaaaactatgtgtataaccaaatgcaacagtatttggaaaatttagtgttattccagtcaagcgctgatttatcaaagaaatttggtacgaaaaaagagccaaacttagatacgtctaaaggtacgatatatgacaatatcacatcgccagtcaacttatacgttatggaatatggtgactttattaactttatggataaaatgagtgcatatccatggattacacaaaactttcaaaaggttcaaatgttacctaaagattttattaatacaaaagatttagaggacgttaagacaagtgaaaaaattactggattaaagacattaaaacagggtggaaaatcaaaagaatggagtttaaacgatttatcattaagtttcacaaagcttcaagagatgatgttgtctaaaaaagacgagtttaaacatatgatacgtaatgagtacatgacgattgaattttatgactggaacggtaacacaatgttacttgacgctggtaaaatttcacaaaaaacaggtgttaagttacgtacaaaatccatcattggttatcataatgaagtgcgagtatatccagttgattataacagtgctgaaaacgatagaccgatacttgctaaaaataaagatatattaattgatacaggttcattcttaaataccaatataacatttaatagttttgcgcaagtgcctatattaattaataacggaattttaggacaatcacaacaagccaatagacagcgtaatgcagaaagtcaattaatcacaagtcgtatagataatgtattaaatggtagtgacccaaaatcacgtttttatgacgctgtaagtgtagcaagtaatttaagtccaaccgctttatttggtaagtttaatgaagaatataatttctacaaacaacaacaggcagaatataaagatttagccttacaaccaccatctgtgacagaatcagaaatgggaaacgcattccaaattgcaaatagcattaacggtttaacgatgaaaattagtgtaccgtcacctaaagaaattacatttttacaaaaatattatatgttgtttggttttgaagtaaatgactataatacattcattgaacctattaacagcatgactgtatgcaactatttaaaatgtacaggtacgtataccatacgtgacattgaccctatgttaatggaacaattaaaagcaattttagaatctggtgtgagattttggcataatgacggttcaggtaatccaatgttacagaacccgttaaataataaatttagagaaggtgtataaaatgaatgaggtaaaattaagatttacggacacagaagcatttcatatgttcatatatgcaggtgatttaaagttactatattttttatttgttttgatgattatagatgttgttactggttttgctaaagcaattaaaaataataatctatggtctaaaaaatcaatgaaaggttttgctaaaaaattattgatattctgtattatcattttagctaacatcattgaccagattttacaattaaaaggtggtttactcatgattacgattttctattatatcgcaaatgagggactatctattgttgaaaattgtgctgaaatggacgtattagtgcctgaacaaattaaagataaattaagagtaattaaaaacgattctgaaaagggtgataataatgaacgaccaagagaagatagataaatttacgcattcgtatattaatgatgatttcggtttaacgatagaccagttagtccctaaagtaaaagggtatggacgctttaatgtatggctaggtggtaatgaaagtaaaatcagacaagtattaaaagcagtaaaagagataggtgtgtcacctactctttttgctgtatatgaaaaaaatgaagggtatagcgctggtttaggttggttgaaccatacatctgcacgaggtgactatttaacagacgctaaattcattgcaagaaaattagtatcacaatcaaaacaagcaggacaaccgtcttggtatgacgcaggtaacatcgttcactttgtacctcaagacgtacaaagaaaaggtaatgcagattttgctaaaaatatgaaagcaggtacaatcggacgtgcgtatattccattaacagcagcggctacttgggcggcatattatcccctaggtttgaaagcgtcatataataaagtacaaaactatggtaatccttttttagacggtgcaaatactattttagcatggggtggtaaattagacggtaaaggtggttcacctagtgattcgtctgacagtggtagtagtggtgacagtggtagttcactgctcgctttagcaaaacaagccatgcaagaattattaaaaaaagtacaagacgcattacaatgggatgtacacagtattggtagtgataaattttttagtaatgattattttacattacaaaaaacatttaacaacacatatcatattaaaatgacgattgggctacttgattcattaaaaaaactgattgatagtgtgcaagtagatagtggggatagtagttcaaaccctactgatgatgacggggaccataaaccaattagtggtaagtcagtcaaaccaaatggtaaaagtggacgcgtcattggtggtaactggacgtatgcacagttaccagaaaaatataaaaaagcaattggtgtacctttattcaaaaaagaatacttgtacaaaccaggtaacatatttcctcaaacgggtaatgcaggacaatgtacagaattaacatgggcatatatgtcacaattacatggtaaaagacaaccaacagacgacggtcaaataacaaacggtcaacgtgtgtggtacgtatataaaaagttaggtgcaaaaacaacacataatccaacagtagggtatggtttttcaagtaaaccaccatacttacaagcaacagcatatggcattggtcacacaggtgtcgttgtagcagtatttgacgatggttcattcttagtagcaaactataacgtcccaccatacgtggcaccgtcacgggttgtattatatacattgattaatggtgtacctcataacgctggtgataatattgtattcttcagtggtattgcttaattaactatgctataatgaaaacatgctagtaatgctagtaaataaaatacaaaacataatcaattttcgtacacatttttcatgttatatcaaaagaaaaaggcgactgttatttaacagttgcctttttttaattcatcgtgttcacgttttaatatatgcaaattagatttattatgcactgaacgtacaactggaaataagtcattaagtgagaatgaaccgatgtcactttcaatataaagaatatcatcaaattgactatggtcaaaattttctctagcgtcttttaagataaattcacgtttcatattaagttcatcagtaaaatattcatcatatacattaccgcatacaatttctgttttagacggataaatcgatatcgtaccctgttcgttatagatacttttattgttttctattatcacaccgtcaaagaattgttcacgtacaaaggtttcaaaatcgacgcttgtatcaaaggcgcttttcggtataccagcagaagcaattttaatctttccattcacttcatatgcatattttttatgattcagtacaaacatcttatctatctgttcgttttcaatatcccatttacctaaggctatcgggtcgaataaactggggttcaataagggtttaacaacggatttcatatacaaactatcagtatcgcaataaataaaattgtcgtcaatttcattttcagttaagtattggaaaggtaccaataagttatataatgaacgtgatgtgacaaatgtagagaataatatattacgttcagtgtttttgtaaccgttaatgatattatatagttcgttgttatcatctaaacggaataagttaaaatgtgaacgtaatgcaggtatgccatataatccgttaagtacaactttagacaacataacctcctcatttgagtaagggtgttcgttgatgtcatcagtaatatgatagtcgtaaggtgatgtcatgttgattttgttttttaacttaccttgtgttttaataaaatagttttgaaatataatatcacgtgcatgaaagtattcacattcatatatcacaaacgaattaacacgtatatgcgtgcaatcaatacccgtaatgtcttgaatcattcttaatgtatttgtattaatattaacgtaatcattatcattattatagtattttacaatcatttgacgtaatacacgtgatttgattttaattaataaatcattgttaaatacatctttatcaatcttatataatgaaaaataattgtcatcatctaaaaaagtagggattaatgtaggttctgaataatgttcataaaagtataaccatgtcggaattttctcatgatacatcacataaggataactggaattgatatcaatagaaaaacaaggctcatcaataagtttgtttatgtatttagtgttatacatatttaaaccaccacgataaaatgatttgatataatcataaaaattcatatcatggaaatgataatgtgtatatgatattttaatatcttgatattgattgagtaactgaaaacgcgtcatttgattatttaaatacgattccataatattcaatgaaaatgttaatttgttatagtcaaaatttggaaatatatcactataatgaatatggcacatacctaatataataacgtcattatgaatgtatgtaagttgttcaggtgtgagtttagcaaaacactttacggcatagtcataggcttcactatctgacatgtcgttatctttatcaaatatcgtgtaattaaaatctgttttaagttggtcgtctgttaaataaccaccgtcaagcaactttttacctaatgttgcaattgatgtatttgttttcataaagttatcaataatattaaatttaaatccatttaaaaacattgttaagtctaaattaatagacgatttcacacgtttttctaaaatcacattttgatttttagctaaaatagtagcctcttgcatctttagtgtgtgttcgttttcttctgcagattttaaatatatattttcacgtgtgatattatcaaaataacgcatggtatctttaagtaaaaaatggttgtcatacttattacagttatgtgcaatcatgataatatctgtttttgacttagtgattgtatcacgtcgtttcacatacgtataaaatgcgtcataaaacgattcaaaactaggaaatacttctacatcaatctcataaccattaaaccaaccaattgctactgaatacgttacgtttttatatttggttggtttttttcgtccgttaactttattgtacgctaatgtttctatatcccagtataaaatcattcgacgttcatgtttatgatattgcatgcattctagtaatcccataatcttacacaccttttataagccgtattgtttcattaaatacttctttgtattttcaatatagttatcttcatatattttttcttttctttcaaattcactcatatttttcttcatttcattttttatatgaaattttataattttattcatatctaaatataaatatctatcattatcaacaacgtaattttttgagtaagcgttatcaaaatgtaaattgcttggattgtaataataacgctccatgttttctttataaaacatatcttctcttaaataaataacattgtcatctatatctttgattttagtacaaaattcatattgttttgtataaggtataacaataatattagcattaaatgtatcaacattatacataatttttatatatttatcgtcagttttaatatagaaaaaatcaccgttttgattgatatgatttcttaaattatcatctgccaaattatattcgttaaattcaaactcgccagtagtcatagcgtcatcgtttgaattgaatgcccgtgtgttacgcttttcatttacgtaatcgtttcttcgcatttctaaaaaaatgtttttgtaaagtcgtgatgtgttcattttatgtttttgtaataagttatatatatttaaattggataatataggacttgaaaagttgactgcattacctagtaaaaacattttaggaaagccaatataatcaacattaccatggttacggtcgattgattcataaattgtttttaacttatcccactcgtcaattaaatagtcatcttcaagtgctaaaaattcatcatatataatgatagggtagtgttttaaaaagttagaatgatattttaaatcagttgcactattcaaatctgtaatcacaccgatttccttatcttgatagatgatagctaaatagtccctagcgcttctgaatgtgacacgcttagatttgaatagtgggtttttgtctatgatttcctcaataaaatcacgataagcgtcacgtaatgtataatgacgtgataataaagtaaatttaatatcaagttttatagctaaataaataaagaatgaaacatagttgaacgattttccgtcagaacggtttgaaatagatatgtaatagtctatatcatcattcatgagttcatcaactaattctatttgattatagttatctggtattttttttctgacatgattgacagcattttgataatctcttaccatgtctaaacgattttgtttcaccatgtttttgctccttataatagtttatgatgtcgtttacagtattaaaattactcttcaaatgttgcataatataaaaagttatacctcacatctttatcatcaatagtagtcactggtctgtctgatttaccaatttctttgtataaagtgtcaatttctttaatatatttatacatagaagaattattatttttagcttgtaattcatataaagcatatttatgttttttagcgtttttattattagattcatctttacggttatatatttcaagtatatagtttaattgttcatgtcttttacctcttaccaatgatacggcatttgcatatgacacgtttctttcttttggaaaatagggcaaatgtgcgaaatgtttccatgtgtctatgtacgcctcttgtaaatctttatcatcaaatttaaaattaacagtactaaaatcatttaaaaacaattctttttcctgctcttttcttgcgtctctttcttttttccatttatccatttcggacgtatgtctaaccattgctaacgacctccatataacccatatataaccactaaaaagataatgtagaatataatcaatgtagtaaataaaacaccaaatgacacacgtatatgcattgtcataagtattacaagtgtaattaaaaatgctaaaaggaaaataatagctatgtttaatatattagtcatgttctatcacgttcccgttattatatatcactttgttttgaaaaattattgttatattactttctattggtttctcgaaatattctaatacgtcatcaatagtacaatccataaaaacttcttttttatataatgggtttaaatgttctcgataaaaaacctcaagacaactaaaactatatgtacgaacatcaacgtcaatgtctaaagtaaataaatcattgtattttgtatcactatcatagtattcaatagaaatttcaccgtatctaacaaaaacaacacattttccacttagtgattcaaattttgttattttattcataaaacaatctctattatctaaaatataattaattaatttttttgtgtttaatattgttgtaatattcattttatatctccttaatgtattttacacaaagattatatgcaccttttttgtaaaagtttgcgtcaaaataactatatattaccttaactttatttattttttcgaattgttcaatttcatgttcatatgtttcattaattgatacattgtataataatacggcagtgtatattttttccattgtttagcacctcataaaaataggggataaatatcccctataaaattgtattaaaatgatactggaccaaagttgattgagtaacctttttgaccttttttgttttcatattcataaattgtaaattgcacttcaccagcattgataatgttaacaacgtcctcgtcttgacgcatgtctttaattaattcagttaagtgattcggtaagtttacgttatagtcgtcagtgacgataacaccttgttcaccgaattttgattctttgtttgtgaataatgctctaacgatatactcttttttcataccgtatttttctactaattctgatagtttaataaattctctttctttttcctcaaattcaaatctcgctaatgtgttttggtgtcttgataaaatatcttttacgtttgtcatttttatttctcctcttatttaaattatttgctttctggaattgaaatttgtagtaaatcattgtaataaacttgaattgttttcgttgtgcgtgtagtggataaaagtttgtgtgaattaggtaataaatcttttgcttgtgtttttgataaatgatactcatgaagtggaataaattcttcaacatattcatttttatcatctaaatagtgaagaatataacctttaattcgtaatgtaacaatatcatcaggtttcattattatatcactcctttctaaaaaacgtaaacgttatacgtttcataaaatcctttgtgcatattccattgttctattgggtcatcaccagcaatgtaagataaaatagattctggtttagtttcgttgtttagttcatcatttaagaattgaacaacagaactattatagtttaataatagttgttggcaagccgatactaagttaattgcattgtcgaaagtataagctggattccattgaataagtttattgaatagttgcaacatttcagtatatgcttgacctttttctgcaggtgcattatcaacattaaccattattatcactccttaaatcattgatttcattccttaattcatcaacgatttttttaggtgaattatggtctaattgttcaaaatcgtccttttcaagtacaaataatgttaattcataagttgatgtattacccataacaataactatattaccattttttaaaatgtaagtttgtaaaggttgtacattttccattttgttacctccttgatttgattacatacatagtatagcaaacgtttaaaagttttgtcaatggtttttcttaaaaagtttaaataatttaaaaatactatttaatagaagaaattagattttaaatacaaatcataattttgaataaaagtcaatagatacatatattttgtattttatgaatatgttataggtttgataagttggaaaagtagaagcacagtttttataagtttagtaaagaaatgataagttaatttataagttttgatttgtataatcgtttattttaaacggtggggaggtgtaattt

SEQ ID NO: 110 - DNA, 18144 bp, Rosenblumvirus sp.
  source 1..18144: mol_type = genomic DNA
ggaaaaagtttttgtaaaattacacctccccaccgtttaaaataaacgattatacaaatcaaaacttataaattaacttatcatttctttactaaacttataaaaactgtgcttctacttttccaacttatcaaacctataacatattcataaaatacaaaatatatgtatctattgacttttattcaaaattatgatttgtatttaaaatctaatttcttctattaaatagtatttttaaattatttaaactttttaagaaaaaccattgacaaaacttttaaacgtttgctatactatgtatgtaatcaaatcaaggaggtaacaaaatggaaaatgtacaacctttacaaacttacattttaaaaaatggtaatatagttattgttatgggtaatacatcaacttatgaattaacattatttgtacttgaaaaggacgattttgaacaattagaccataattcacctaaaaaaatcgttgatgaattaaggaatgaaatcaatgatttaaggagtgataataatggttaatgttgataatgcacctgcagaaaaaggtcaagcatatactgaaatgttgcaactattcaataaacttattcaatggaatccagcttatactttcgacaatgcaattaacttagtatcggcttgccaacaactattattaaactataatagttctgttgttcaattcttaaatgatgaactaaacaacgaaactaaaccagaatctattttatcttacattgctggtgatgacccaatagaacaatggaatatgcacaaaggattttatgaaacgtataacgtttacgttttttagaaaggagtgatataataatgaaacctgatgatattgttacattacgaattaaaggttatattcttcactatttagatgataaaaatgaatatgttgaagaatttattccacttcatgagtatcatttatcaaaaacacaagcaaaagatttattacctaattcacacaaacttttatccactacacgcacaacgaaaacaattcaagtttattacaatgatttactacaaatttcaattccagaaagcaaataatttaaataagaggagaaataaaaatgacaaacgtaaaagatattttatcaagacaccaaaacacattagcgagatttgaatttgaggaaaaagaaagagaatttattaaactatcagaattagtagaaaaatacggtatgaaaaaagagtatatcgttagagcattattcacaaacaaagaatcaaaattcggtgaacaaggtgttatcgtcactgacgactataacgtaaacttaccgaatcacttaactgaattaattaaagacatgcgtcaagacgaggacgttgttaacattatcaatgctggtgaagtgcaatttacaatttatgaatatgaaaacaaaaaaggtcaaaaaggttactcaatcaactttggtccagtatcattttaatacaattttataggggatatttatcccctatttttatgaggtgctaaacaatggaaaaaatatacactgccgtattattatacaatgtatcaattaatgaaacatatgaacatgaaattgaacaattcgaaaaaataaataaagttaaggtaatatatagttattttgacgcaaacttttacaaaaaaggtgcatataatctttgtgtaaaatacattaaggagatataaaatgaatattacaacaatattaaacacaaaaaaattaattaattatattttagataatagagattgttttatgaataaaataacaaaatttgaatcactaagtggaaaatgtgttgtttttgttagatacggtgaaatttctattgaatactatgatagtgatacaaaatacaatgatttatttactttagacattgacgttgatgttcgtacatatagttttagttgtcttgaggttttttatcgagaacatttaaacccattatataaaaaagaagtttttatggattgtactattgatgacgtattagaatatttcgagaaaccaatagaaagtaatataacaataatttttcaaaacaaagtgatatataataacgggaacgtgatagaacatgactaatatattaaacatagctattattttccttttagcatttttaattacacttgtaatacttatgacaatgcatatacgtgtgtcatttggtgttttatttactacattgattatattctacattatctttttagtggttatatatgggttatatggaggtcgttagcaatggttagacatacgtccgaaatggataaatggaaaaaagaaagagacgcaagaaaagagcaggaaaaagaattgtttttaaatgattttagtactgttaattttaaatttgatgataaagatttacaagaggcgtacatagacacatggaaacatttcgcacatttgccctattttccaaaagaaagaaacgtgtcatatgcaaatgccgtatcattggtaagaggtaaaagacatgaacaattaaactatatacttgaaatatataaccgtaaagatgaatctaataataaaaacgctaaaaaacataaatatgctttatatgaattacaagctaaaaataataattcttctatgtataaatatattaaagaaattgacactttatacaaagaaattggtaaatcagacagaccagtgactactattgatgataaagatgtgaggtataactttttatattatgcaacatttgaagagtaattttaatactgtaaacgacatcataaactattataaggagcaaaaacatggtgaaacaaaatcgtttagacatggtaagagattatcaaaatgctgtcaatcatgtcagaaaaaaaataccagataactataatcaaatagaattagttgatgaactcatgaatgatgatatagactattacatatctatttcaaaccgttctgacggaaaatcgttcaactatgtttcattctttatttatttagctataaaacttgatattaaatttactttattatcacgtcattatacattacgtgacgcttatcgtgattttattgaggaaatcatagacaaaaacccactattcaaatctaagcgtgtcacattcagaagcgctagggactatttagctatcatctatcaagataaggaaatcggtgtgattacagatttgaatagtgcaactgatttaaaatatcattctaactttttaaaacactaccctatcattatatatgatgaatttttagcacttgaagatgactatttaattgacgagtgggataagttaaaaacaatttatgaatcaatcgaccgtaaccatggtaatgttgattatattggctttcctaaaatgtttttactaggtaatgcagtcaacttttcaagtcctatattatccaatttaaatatatataacttattacaaaaacataaaatgaacacatcacgactttacaaaaacatttttttagaaatgcgaagaaacgattacgtaaatgaaaagcgtaacacacgggcattcaattcaaacgatgacgctatgactactggcgagtttgaatttaacgaatataatttggcagatgataatttaagaaatcatatcaatcaaaacggtgattttttctatattaaaactgacgataaatatataaaaattatgtataatgttgatacatttaatgctaatattattgttataccttatacaaaacaatatgaattttgtactaaaatcaaagatatagatgacaatgttatttatttaagagaagatatgttttataaagaaaacatggagcgttattattacaatccaagcaatttacattttgataacgcttactcaaaaaattacgttgttgataatgatagatatttatatttagatatgaataaaattataaaatttcatataaaaaatgaaatgaagaaaaatatgagtgaatttgaaagaaaagaaaaaatatatgaagataactatattgaaaatacaaagaagtatttaatgaaacaatacggcttataaaaggtgtgtaagattatgggattactagaatgcatgcaatatcataaacatgaacgtcgaatgattttatactgggatatagaaacattagcgtacaataaagttaacggacgaaaaaaaccaaccaaatataaaaacgtaacgtattcagtagcaattggttggtttaatggttatgagattgatgtagaagtatttcctagttttgaatcgttttatgacgcattttatacgtatgtgaaacgacgtgatacaatcactaagtcaaaaacagatattatcatgattgcacataactgtaataagtatgacaaccattttttacttaaagataccatgcgttattttgataatatcacacgtgaaaatatatatttaaaatctgcagaagaaaacgaacacacactaaagatgcaagaggctactattttagctaaaaatcaaaatgtgattttagaaaaacgtgtgaaatcgtctattaatttagacttaacaatgtttttaaatggatttaaatttaatattattgataactttatgaaaacaaatacatcaattgcaacattaggtaaaaagttgcttgacggtggttatttaacagacgaccaacttaaaacagattttaattacacgatatttgataaagataacgacatgtcagatagtgaagcctatgactatgccgtaaagtgttttgctaaactcacacctgaacaacttacatacattcataatgacgttattatattaggtatgtgccatattcattatagtgatatatttccaaattttgactataacaaattaacattttcattgaatattatggaatcgtatttaaataatcaaatgacgcgttttcagttactcaatcaatatcaagatattaaaatatcatatacacattatcatttccatgatatgaatttttatgattatatcaaatcattttatcgtggtggtttaaatatgtataacactaaatacataaacaaacttattgatgagccttgtttttctattgatatcaattccagttatccttatgtgatgtatcatgagaaaattccgacatggttatacttttatgaacattattcagaacctacattaatccctacttttttagatgatgacaattatttttcattatataagattgataaagatgtatttaacaatgatttattaattaaaatcaaatcacgtgtattacgtcaaatgattgtaaaatactataataatgataatgattacgttaatattaatacaaatacattaagaatgattcaagacattacgggtattgattgcacgcatatacgtgttaattcgtttgtgatatatgaatgtgaatactttcatgcacgtgatattatatttcaaaactattttattaaaacacaaggtaagttaaaaaacaaaatcaacatgacatcaccttacgactatcatattactgatgacatcaacgaacacccttactcaaatgaggaggttatgttgtctaaagttgtacttaacggattatatggcatacctgcattacgttcacattttaacttattccgtttagatgataacaacgaactatataatatcattaacggttacaaaaacactgaacgtaatatattattctctacatttgtcacatcacgttcattatataacttattggtacctttccaatacttaactgaaaatgaaattgacgacaattttatttattgcgatactgatagtttgtatatgaaatccgttgttaaacccttattgaaccccagtttattcgacccgatagccttaggtaaatgggatattgaaaacgaacagatagataagatgtttgtactgaatcataaaaaatatgcatatgaagtgaatggaaagattaaaattgcttctgctggtataccgaaaagcgcctttgatacaagcgtcgattttgaaacctttgtacgtgaacaattctttgacggtgtgataatagaaaacaataaaagtatctataacgaacagggtacgatatcgatttatccgtctaaaacagaaattgtatgcggtaatgtatatgatgaatattttactgatgaacttaatatgaaacgtgaatttatcttaaaagacgctagagaaaattttgaccatagtcaatttgatgatattctttatattgaaagtgacatcggttcattctcacttaatgacttatttccagttgtacgttcagtgcataataaatctaatttgcatatattaaaacgtgaacacgatgaattaaaaaaaggcaactgttaaataacagtcgcctttttcttttgatataacatgaaaaatgtgtacgaaaattgattatgttttgtattttatttactagcattactagcatgttttcattatagcatagttaattaagcaataccactgaagaatacaatattatcaccagcgttatgaggtacaccattaatcaatgtatataatacaacccgtgacggtgccacgtatggtgggacgttatagtttgctactaagaatgaaccatcgtcaaatactgctacaacgacacctgtgtgaccaatgccatatgctgttgcttgtaagtatggtggtttacttgaaaaaccataccctactgttggattatgtgttgtttttgcacctaactttttatatacgtaccacacacgttgaccgtttgttatttgaccgtcgtctgttggttgtcttttaccatgtaattgtgacatatatgcccatgttaattctgtacattgtcctgcattacccgtttgaggaaatatgttacctggtttgtacaagtattcttttttgaataaaggtacaccaattgcttttttatatttttctggtaactgtgcatacgtccagttaccaccaatgacgcgtccacttttaccatttggtttgactgacttaccactaattggtttatggtccccgtcatcatcagtagggtttgaactactatccccactatctacttgcacactatcaatcagtttttttaatgaatcaagtagcccaatcgtcattttaatatgatatgtgttgttaaatgttttttgtaatgtaaaataatcattactaaaaaatttatcactaccaatactgtgtacatcccattgtaatgcgtcttgtactttttttaataattcttgcatggcttgttttgctaaagcgagcagtgaactaccactgtcaccactactaccactgtcagacgaatcactaggtgaaccacctttaccgtctaatttaccaccccatgctaaaatagtatttgcaccgtctaaaaaaggattaccatagttttgtactttattatatgacgctttcaaacctaggggataatatgccgcccaagtagccgctgctgttaatggaatatacgcacgtccgattgtacctgctttcatatttttagcaaaatctgcattaccttttctttgtacgtcttgaggtacaaagtgaacgatgttacctgcgtcataccaagacggttgtcctgcttgttttgattgtgatactaattttcttgcaatgaatttagcgtctgttaaatagtcacctcgtgcagatgtatggttcaaccaacctaaaccagcgctatacccttcatttttttcatatacagcaaaaagagtaggtgacacacctatctcttttactgcttttaatacttgtctgattttactttcattaccacctagccatacattaaagcgtccatacccttttactttagggactaactggtctatcgttaaaccgaaatcatcattaatatacgaatgcgtaaatttatctatcttctcttggtcgttcattattatcacccttttcagaatcgtttttaattactcttaatttatctttaatttgttcaggcactaatacgtccatttcagcacaattttcaacaatagatagtccctcatttgcgatataatagaaaatcgtaatcatgagtaaaccaccttttaattgtaaaatctggtcaatgatgttagctaaaatgataatacagaatatcaataattttttagcaaaacctttcattgattttttagaccatagattattatttttaattgctttagcaaaaccagtaacaacatctataatcatcaaaacaaataaaaaatatagtaactttaaatcacctgcatatatgaacatatgaaatgcttctgtgtccgtaaatcttaattttacctcattcattttatacaccttctctaaatttattatttaacgggttctgtaacattggattacctgaaccgtcattatgccaaaatctcacaccagattctaaaattgcttttaattgttccattaacatagggtcaatgtcacgtatggtatacgtacctgtacattttaaatagttgcatacagtcatgctgttaataggttcaatgaatgtattatagtcatttacttcaaaaccaaacaacatataatatttttgtaaaaatgtaatttctttaggtgacggtacactaattttcatcgttaaaccgttaatgctatttgcaatttggaatgcgtttcccatttctgattctgtcacagatggtggttgtaaggctaaatctttatattctgcctgttgttgtttgtagaaattatattcttcattaaacttaccaaataaagcggttggacttaaattacttgctacacttacagcgtcataaaaacgtgattttgggtcactaccatttaatacattatctatacgacttgtgattaattgactttctgcattacgctgtctattggcttgttgtgattgtcctaaaattccgttattaattaatataggcacttgcgcaaaactattaaatgttatattggtatttaagaatgaacctgtatcaattaatatatctttatttttagcaagtatcggtctatcgttttcagcactgttataatcaactggatatactcgcacttcattatgataaccaatgatggattttgtacgtaacttaacacctgttttttgtgaaattttaccagcgtcaagtaacattgtgttaccgttccagtcataaaattcaatcgtcatgtactcattacgtatcatatgtttaaactcgtcttttttagacaacatcatctcttgaagctttgtgaaacttaatgataaatcgtttaaactccattcttttgattttccaccctgttttaatgtctttaatccagtaattttttcacttgtcttaacgtcctctaaatcttttgtattaataaaatctttaggtaacatttgaaccttttgaaagttttgtgtaatccatggatatgcactcattttatccataaagttaataaagtcaccatattccataacgtataagttgactggcgatgtgatattgtcatatatcgtacctttagacgtatctaagtttggctcttttttcgtaccaaatttctttgataaatcagcgcttgactggaataacactaaattttccaaatactgttgcatttggttatacacatagtttttatttgatacttttaacacatcatcattgttacgtaacatcggcaacatatagttatacgtacgctttgataagtgttgacgttcaatattaacgtttgaaagttgttctaatacattaccttgtgtatacgtcataatagtatcaatcacaaaatatatttttaccacaacatcattcacatattcgatttgattcacaaaagcgtaatagcgtctatcctcaaaatctgataaaaacgtcatgtagttaatcccttgtgcgtcatgccactgcatatcaacattgatttccattctatcacgtataaaattatacggttgtttggaatagtctaatgatttaaaatgacgaccgtttaaaaaataatcatcacgctctttattactattaaaatgaattgtattttgatagtctgtaaacggtgtgttatagaaaaatttaaaatttgttaattttctcatttttacctccataaaaaatagtcgtataaataatttatacgactattataacatttttattcaatgatttgtgtatctattgcaaaacgtttatctccatttgttaagtcactatcgctataatttgatgtaacaaaatgtaattcattattaaagtttaaatataatcttgtattcatcattttattatcaatcgcacattgtgtgtagtgatgtgttgattttaagtttgcgttaatcgtacctaatttaatatcaccgtttttcttaatcccttttaataccccttttaattgtatggttttaacaccattaattgttacaatacgatattgcggtgcgggataacccccgttgctatcacttgcaacaataccactttcaagttgcacatcttgccaacctgtatcattaaattgtaattttgcactgttaattttttgatcaaaattttgttcaatttctgatttagattgtgcaattttagtatctatatttaagttatccacttttgttgataaaacgcttatacttgattcgtttgttgatgttttttgttttaaatcactaatatcattatcatattttgataaatcaatatgaccgtttccgtcaacaactggtctgtcttttaattcttgaataactttttcaatttttgatattttatcattatttgtttttaaagtagcgatgtcagatttaattgaattaatatcctgtgtataatctttttggttaatactgtttaattttgtttctaactcttttatcttatcaaggttggtatttgctttgatgtcattaatggtttgttctaaactttcaagtttcccagaacttgaattttgttttaacttattaatatcctcttgtatttcttgaattgtgttgtcattgttttgtttagattttaataattcaatttgactttctatgtcttttattttatcaagattaacactttttttaacttcagctaattctctttttaatgcgtcaatgttttctgcaccagtatttgatttaattatattaatttcatttgtgtttcgtcctacactatctttagtagcgtttaaagattgtgtaagtgtttcatatttatcatcatactttaacattgatttttcaaattcatttaattgtgtttgatgttgttctaaactttcatttaatatgacatttttttcttttaatgaatcaatgtcttttttattactatcaatcattggttggaatttttttattttctctagaaatgttgatattttttctttgttatcattaattgcaatatcatgatgttctatttgaccactgtatttattaatcaatgtttttaaatcattataaaatgttaatttataataaccagtatcagtacggacataaatatgtccgtctgatgtactgattaagtcattttcttctgttaaaaaatctgctaacctgtctattgtttcaacttgtcttaaacttcttacgattctatcagccattgttcacacctcttatttgtatcgtttccaactaaactcaaagaaaaaacctaaaatacccattatgagaaaaccccccaaggaataccaacactataactattacccgttttaccgttccattttcttactggtaaataataacgtgtaccttgccagttgtaaccaatccatacatacccatctgataaacaaacttcgtcatatggtgtataaccatttggttggaaccaatatccattaggttcacttaatttaggactacctacacgtgcaaatattggtaaaaatccacatgtaaatgttgcattttcatttctgtaatatgtgccatattggttttgtttccattttccgaatgtgtttacttttgatgtttctaattcgttgctgttactagcagaaaatttaggtctaataaagtgtgttacaccgtcataataatgtgttcttattgttgctttttcccaaccgtcaaacccaccacctaaccagttttgctctaaacatgtataataatctaaattaccacttaacacacattgaatatgtccatattgtccatctgtatatacaccaacatcccctaattgtggtttaaagttcggtgtattttcatacaccattgctaaacctttaaagtcattattgattgcgtctttagcgttaccccacatacgaactttaccgtctgtaatgtaatatatataagcaacagctaagtcagcgcattgataaccaaatgctaaatcaaagtccacacctacaccctcatgcttatatatccattcttttgcttgttgttgtgatttcatgaaacattatcctttcttaacccaactatattgacgtttttttgtatctgcattaacgttactaaagaattctttatgttcggacacattagcctctaatgtttgtcttacttcaccgacagcgttaccacttgaaacacgtaaccatgcacccacttttttaatttcttctggtgcgtctctaaacaattccatttggttaccagtaatataatattcaccaggtgtcgtaacgtaagctatccagttattgtattgacttgcttctaaatactcttgatatggtgcgtctgttttgattgttgtccataaaccataatcccattttaatgtaaatacatcgagcgtcataccacgcatgattttaaccatttttcgaccagtagaaaaacgcgttaattcttgtactgtacctaatgtttgtgttgtagggtatacattgatgaaacaaccagcgtctataatttttttactaccattcattggcatatttttaagtttactagctgtaccaccgtcaatataatagaaccctgcttgtgttaagtcatttaagtcgtcaatatggtctggaattgataacgcacgtccatcgtcttttgttaatttatagttttgtgaacctctcgcacgtaatgcttcaaagtgttcatactcaccaagttgaaagaacccatataaattattgaatcgttttccaccaccgccattagtcatagcaagtaataacgatttacgttttgtttttggattggtataaatacaaataccctccggctctttaaagttatcacgtggaaaattaataccgtcttgatatgataatttaaacggataatcataaatcttttgaccagttgttaatgaatatttaccaatttgaacgtgtgaattaactgaactgttaccacttaaccagtataaatcatcaccatcaacggcaatcccttgcatccatcgattatcattgttttctgaattatcaatcgtcatttctttttctacattatcaatgtgattttttacgtcagctcttgaacgtacctgtattgtcccgtcaccgaatcttaaaacgattttgtcattttcttcatcaattaacggtgtaaacgtgtgtttgtttaaaagtgactgtggtgtataatctgttaaccctttagcctcttctaaatctaaaatataattatctttatatgcgacttgtaacagttttgctacaccgtcatgatgtaaccatattttcatttcaccgttagattgtctttctaaacctattgtagtaccgtgaccaccttgtacaatacgcatactagaaattaagtcaccgctaggcgttaatttattaatccaaaaaccttctgggttttgtgaatctgattgtgtagagtacatttgattcgtttctttatctatgtttatagattggttaacagcattacgaataccaccgaatcccataacaaactttggttcaagctcatttaattcaaaaccattaacaaaacggtcaatgtctttaattaagtctttaacttctgatttaaaatcattcatttgtttcatttctgcaactttaaataatgcaaatgcagatgtaagaccagtactatatttagtaaattcatcatgaataattttatctattgtaccgtcgtttaaccaacctctaaataagtctttcgcttggtctgggaatgctttcattaagtcgtcccaatttttgaaacgtttttttaattcattgtcatagtcccaaatacgacgtgctaatacttcaattagttttgataatcttgaaatataatcataatatgattttgaattggtattataatctgctctatcatcgtaaaacggtgtgtaacgttctctcgttttatatatttcgtctaaaaatggacgaatgtcgtcaaaatatttaaaatcgttttcattatatgccataattttccacctttaccaaatttgtaaaaaacattttttatcaaattcatttaaaattttctttcttaaatcgtatactttatcaatattatcaattaaatactgttttgaaaattgtgtacctttcgcattacctttttgattttgattacgttttgcgttttgattactttcgttacttgatttattcacagttttaccgttgtcaattgtattattatctgcaaatcgtaacgttgtgttatctacatcaatgttaacctcgctttgtggtaatgacgcataagcatttctgttcgctgtcatgccagttgaattgtctaaagatgttgcattttgatttgaggtttcatctgtattgtttgttgtatcttcattatgttctgtaaaaccttgtgattgtagatatttttcaacttcgcttgatgaataaaccacattcaaataatcctcatgtgtgatacatacagtaatcacttgcatgccaaaagcttcaactgtttgtctgttgatttctctatctaaaaagtgtattgtaaatgattttttaaaaagtaagtcagataagtcatctttaagtttaaaacctttaaacactttttcattaacgatggctaaaacgtctttgtcaaacttcaacattttttgcatgaattgaaattcatcatcataaaacgttaatttatcattatttacaaattcattaaaaccttttttaattaattctgatttaataaaatcaaataaagtcattgtatatctagccattgtattcactactttcatcattagacaatgtatctatcattgtgatttctgaagtaacttcatcgtcgtaatacggtttaatatctaaaccataacgttttgataagaatgtaatcggttcacgaccttttaaataaatattactatttgatgtggtaaaacctcggttgctttttgcctcttcgtccgaaacaccgctttccttatccactgctagtgagttaatacctaaatagttacttaattcactaattttattttggtattcgcgtttcatctcagttagtgctggaatcacactattactggttaaatctatgatatcatcatcggcgttaaacataggtgacattttaacaaatggtgcaccgttgtatatttccgatacaagttgattaactgactcatcattaatgtctgatttaaatattttgctaaattttgcttgcataattaatgagaatctagataaaacaacctcagataattcatcagtataatgttctataatttctatatcactattatattgaattggtttattttgcatgacaacaaagttaccactcatacagttatcatatattttatgaatctgtaagcattcatctggtattaaatagtctggaacaatgaaataaatatcatcttttgttaatcgtttttgaaattgaaagttaaagtttgatgaaaaatttggtgcttgattaaagtaagtattatttacgtaaccaagaatcataatttgttcatttcttgctttgccgaccactacattgatgttttgtcttaatgctgattctaattgaataaaatctataccaaccgtatcacgattggtatagttgatgagtagtggtaaaaattccaaataacgattaaacataagacgtttaaatctgttgcgatgttctacaactcttttgttgatttcttttgataattcaacctgtacacctttattatgtttagtcatttatagcacctctattattctgttcttggtgttacatcttggtcagtaattaaaattttattaaagaatgggctaatggctttaaatgaatagtaatgaatccagtgtgtgacttcatcaaattcaccattatagaatggttgttttaacataccttttgtgtaacgtttatatttaattgaattaatatccaaaataaacgcgtataaatctgattttggtttaatttcttcaacattatctttaaactctgatagttttgacacatcataagtgaatactgaaccaactggaattgtatcacctttatgagtttgataatcaccgtaagcacgtaagaaagctactgattcatcacttgatacgacaatatctttagtgactttgaaaacaccacctaggtcgtcaaaactgataacgtggtctgtaaagtcaatccctgctacttggaatgtgttcgcaatctttgtatctaaaagataagattttaagctatcagtcgttaaaataacaatatcttttaattttgaaactgttgtatattgtccgattgcaccacctgaagcacgatgaacttcattatatttagcgctgttgttttgtaagttaagaatagcttcaaaaactttacttgctaaatcttcttttgatgttgctttacgtacatttgattcagataattgattcaatgagtaatcaactaacattgcacgcatttctttttcttctaatacgttaatatcagaaattttctttttatagacacctaatgcataattagtagcgtctgctaatgtttggaaattgaaacgtgtgtcattgttatttaatgtaaatttttgtttcttcacaataccactaccatataacttagtagccatacgtggatagttacgtttcaacattagttcttcatttttagataagtccatgttaataggtactgtatccataattacatattcttcactgtattgacctataaagtcctgctctttagctaaccaattaaaacggttacctaatgcaatatcgattaataacgtttcattaatcttagggaataaaaatttatttacaaatgtttcaaacattgtattagaattatcccacttatcgccaaacgtccatgattttgaataagtatgattaaagtcttgtaatgcagatttagctgactttgcaactaatagtgctgtttcgttttttgtactcttttctgccatgatttattattcctcctcaacatcgccagtaaatgactgttttgaaagtgaatgaatttgtacaccataactatcttcacttttatttgtatcaattgacatattttcatttaattctgttcgtttatttaatcttgaatcttcatatgatgtacccatcatagaacgcatgttgttaccctcgtacatgtttaagttcctcctaatctaaatctaatttatcgacaagttcttcatctgaatagtctttatcattgttatctgtttcttttgattctggttgtggttgtggttgtggttgtggttgttgcatttgtgatgtttcaaaattagtaaatcgttgttctaatgaagcgatacgttgttctaaaacaactgggtctaattttgcacaatcttcatctgttgtagtaggttctaatttgttttcattttcttcttcgattgtttctactgttttatcttcagttgattcttcagttgattcttcagttgattctgaagtttcttcagttgattctgaagtttcttctttgtcgtctggttttacgatttcatcaaattctgtcattttgacacctccaaatattttataactaattatatcatagaatatttaaataagtaaattaaatttattttattttcaaatcataactttgaataaaagtcaatagatacataaattttgtatttaatgaatatgtaataggttagataagttggaaaagtagacgcacagtttttataagtttagtaaagaaatgatatgttaatttataagttttgatttgtataatcgtttattttaaacggtggggaggtgtaaatttacaataactttttc

SEQ ID NO: 111 - DNA, 18141 bp, Rosenblumvirus sp.
  source 1..18141: mol_type = genomic DNA
gggaaaaagtttttgtaaaattacacctccccaccgtttaaaataaacgattatacaaatcaaaacttataaattaacttatcatttctttactaaacttataaaaactgtgcttctacttttccaacttatcaaacctataacatattcataaaatacaaaatatatgtatctattgacttttattcaaaattatgatttgtatttaaaatctaatttcttctattaaatagtatttttaaattatttaaactttttaagaaaaaccattgacaaaacttttaaacgtttgctatactatgtatgtaatcaaatcaaggaggtaacaaaatggaaaatgtacaacctttacaaacttacattttaaaaaatggtaatatagttattgttatgggtaatacatcaacttatgaattaacattatttgtacttgaaaaggacgattttgaacaattagaccataattcacctaaaaaaatcgttgatgaattaaggaatgaaatcaatgatttaaggagtgataataatggttaatgttgataatgcacctgcagaaaaaggtcaagcatatactgaaatgttgcaactattcaataaacttattcaatggaatccagcttatactttcgacaatgcaattaacttagtatcggcttgccaacaactattattaaactataatagttctgttgttcaattcttaaatgatgaactaaacaacgaaactaaaccagaatctattttatcttacattgctggtgatgacccaatagaacaatggaatatgcacaaaggattttatgaaacgtataacgtttacgttttttagaaaggagtgatataataatgaaacctgatgatattgttacattacgaattaaaggttatattcttcactatttagatgataaaaatgaatatgttgaagaatttattccacttcatgagtatcatttatcaaaaacacaagcaaaagatttattacctaattcacacaaacttttatccactacacgcacaacgaaaacaattcaagtttattacaatgatttactacaaatttcaattccagaaagcaaataatttaaataagaggagaaataaaaatgacaaacgtaaaagatattttatcaagacaccaaaacacattagcgagatttgaatttgaggaaaaagaaagagaatttattaaactatcagaattagtagaaaaatacggtatgaaaaaagagtatatcgttagagcattattcacaaacaaagaatcaaaattcggtgaacaaggtgttatcgtcactgacgactataacgtaaacttaccgaatcacttaactgaattaattaaagacatgcgtcaagacgaggacgttgttaacattatcaatgctggtgaagtgcaatttacaatttatgaatatgaaaacaaaaaaggtcaaaaaggttactcaatcaactttggtccagtatcattttaatacaattttataggggatatttatcccctatttttatgaggtgctaaacaatggaaaaaatatacactgccgtattattatacaatgtatcaattaatgaaacatatgaacatgaaattgaacaattcgaaaaaataaataaagttaaggtaatatatagttattttgacgcaaacttttacaaaaaaggtgcatataatctttgtgtaaaatacattaaggagatataaaatgaatattacaacaatattaaacacaaaaaaattaattaattatattttagataatagagattgttttatgaataaaataacaaaatttgaatcactaagtggaaaatgtgttgtttttgttagatacggtgaaatttctattgaatactatgatagtgatacaaaatacaatgatttatttactttagacattgacgttgatgttcgtacatatagttttagttgtcttgaggttttttatcgagaacatttaaacccattatataaaaaagaagtttttatggattgtactattgatgacgtattagaatatttcgagaaaccaatagaaagtaatataacaataatttttcaaaacaaagtgatatataataacgggaacgtgatagaacatgactaatatattaaacatagctattattttccttttagcatttttaattacacttgtaatacttatgacaatgcatatacgtgtgtcatttggtgttttatttactacattgattatattctacattatctttttagtggttatatatgggttatatggaggtcgttagcaatggttagacatacgtccgaaatggataaatggaaaaaagaaagagacgcaagaaaagagcaggaaaaagaattgtttttaaatgattttagtactgttaattttaaatttgatgataaagatttacaagaggcgtacatagacacatggaaacatttcgcacatttgccctattttccaaaagaaagaaacgtgtcatatgcaaatgccgtatcattggtaagaggtaaaagacatgaacaattaaactatatacttgaaatatataaccgtaaagatgaatctaataataaaaacgctaaaaaacataaatatgctttatatgaattacaagctaaaaataataattcttctatgtataaatatattaaagaaattgacactttatacaaagaaattggtaaatcagacagaccagtgactactattgatgataaagatgtgaggtataactttttatattatgcaacatttgaagagtaattttaatactgtaaacgacatcataaactattataaggagcaaaaacatggtgaaacaaaatcgtttagacatggtaagagattatcaaaatgctgtcaatcatgtcagaaaaaaaataccagataactataatcaaatagaattagttgatgaactcatgaatgatgatatagactattacatatctatttcaaaccgttctgacggaaaatcgttcaactatgtttcattctttatttatttagctataaaacttgatattaaatttactttattatcacgtcattatacattacgtgacgcttatcgtgattttattgaggaaatcatagacaaaaacccactattcaaatctaagcgtgtcacattcagaagcgctagggactatttagctatcatctatcaagataaggaaatcggtgtgattacagatttgaatagtgcaactgatttaaaatatcattctaactttttaaaacactaccctatcattatatatgatgaatttttagcacttgaagatgactatttaattgacgagtgggataagttaaaaacaatttatgaatcaatcgaccgtaaccatggtaatgttgattatattggctttcctaaaatgtttttactaggtaatgcagtcaacttttcaagtcctatattatccaatttaaatatatataacttattacaaaaacataaaatgaacacatcacgactttacaaaaacatttttttagaaatgcgaagaaacgattacgtaaatgaaaagcgtaacacacgggcattcaattcaaacgatgacgctatgactactggcgagtttgaatttaacgaatataatttggcagatgataatttaagaaatcatatcaatcaaaacggtgattttttctatattaaaactgacgataaatatataaaaattatgtataatgttgatacatttaatgctaatattattgttataccttatacaaaacaatatgaattttgtactaaaatcaaagatatagatgacaatgttatttatttaagagaagatatgttttataaagaaaacatggagcgttattattacaatccaagcaatttacattttgataacgcttactcaaaaaattacgttgttgataatgatagatatttatatttagatatgaataaaattataaaatttcatataaaaaatgaaatgaagaaaaatatgagtgaatttgaaagaaaagaaaaaatatatgaagataactatattgaaaatacaaagaagtatttaatgaaacaatacggcttataaaaggtgtgtaagattatgggattactagaatgcatgcaatatcataaacatgaacgtcgaatgattttatactgggatatagaaacattagcgtacaataaagttaacggacgaaaaaaaccaaccaaatataaaaacgtaacgtattcagtagcaattggttggtttaatggttatgagattgatgtagaagtatttcctagttttgaatcgttttatgacgcattttatacgtatgtgaaacgacgtgatacaatcactaagtcaaaaacagatattatcatgattgcacataactgtaataagtatgacaaccattttttacttaaagataccatgcgttattttgataatatcacacgtgaaaatatatatttaaaatctgcagaagaaaacgaacacacactaaagatgcaagaggctactattttagctaaaaatcaaaatgtgattttagaaaaacgtgtgaaatcgtctattaatttagacttaacaatgtttttaaatggatttaaatttaatattattgataactttatgaaaacaaatacatcaattgcaacattaggtaaaaagttgcttgacggtggttatttaacagacgaccaacttaaaacagattttaattacacgatatttgataaagataacgacatgtcagatagtgaagcctatgactatgccgtaaagtgttttgctaaactcacacctgaacaacttacatacattcataatgacgttattatattaggtatgtgccatattcattatagtgatatatttccaaattttgactataacaaattaacattttcattgaatattatggaatcgtatttaaataatcaaatgacgcgttttcagttactcaatcaatatcaagatattaaaatatcatatacacattatcatttccatgatatgaatttttatgattatatcaaatcattttatcgtggtggtttaaatatgtataacactaaatacataaacaaacttattgatgagccttgtttttctattgatatcaattccagttatccttatgtgatgtatcatgagaaaattccgacatggttatacttttatgaacattattcagaacctacattaatccctacttttttagatgatgacaattatttttcattatataagattgataaagatgtatttaacaatgatttattaattaaaatcaaatcacgtgtattacgtcaaatgattgtaaaatactataataatgataatgattacgttaatattaatacaaatacattaagaatgattcaagacattacgggtattgattgcacgcatatacgtgttaattcgtttgtgatatatgaatgtgaatactttcatgcacgtgatattatatttcaaaactattttattaaaacacaaggtaagttaaaaaacaaaatcaacatgacatcaccttacgactatcatattactgatgacatcaacgaacacccttactcaaatgaggaggttatgttgtctaaagttgtacttaacggattatatggcatacctgcattacgttcacattttaacttattccgtttagatgataacaacgaactatataatatcattaacggttacaaaaacactgaacgtaatatattattctctacatttgtcacatcacgttcattatataacttattggtacctttccaatacttaactgaaaatgaaattgacgacaattttatttattgcgatactgatagtttgtatatgaaatccgttgttaaacccttattgaaccccagtttattcgacccgatagccttaggtaaatgggatattgaaaacgaacagatagataagatgtttgtactgaatcataaaaaatatgcatatgaagtgaatggaaagattaaaattgcttctgctggtataccgaaaagcgcctttgatacaagcgtcgattttgaaacctttgtacgtgaacaattctttgacggtgtgataatagaaaacaataaaagtatctataacgaacagggtacgatatcgatttatccgtctaaaacagaaattgtatgcggtaatgtatatgatgaatattttactgatgaacttaatatgaaacgtgaatttatcttaaaagacgctagagaaaattttgaccatagtcaatttgatgatattctttatattgaaagtgacatcggttcattctcacttaatgacttatttccagttgtacgttcagtgcataataaatctaatttgcatatattaaaacgtgaacacgatgaattaaaaaaaggcaactgttaaataacagtcgcctttttcttttgatataacatgaaaaatgtgtacgaaaattgattatgttttgtattttatttactagcattactagcatgttttcattatagcatagttaattaagcaataccactgaagaatacaatattatcaccagcgttatgaggtacaccattaatcaatgtatataatacaacccgtgacggtgccacgtatggtgggacgttatagtttgctactaagaatgaaccatcgtcaaatactgctacaacgacacctgtgtgaccaatgccatatgctgttgcttgtaagtatggtggtttacttgaaaaaccataccctactgttggattatgtgttgtttttgcacctaactttttatatacgtaccacacacgttgaccgtttgttatttgaccgtcgtctgttggttgtcttttaccatgtaattgtgacatatatgcccatgttaattctgtacattgtcctgcattacccgtttgaggaaatatgttacctggtttgtacaagtattcttttttgaataaaggtacaccaattgcttttttatatttttctggtaactgtgcatacgtccagttaccaccaatgacgcgtccacttttaccatttggtttgactgacttaccactaattggtttatggtccccgtcatcatcagtagggtttgaactactatccccactatctacttgcacactatcaatcagtttttttaatgaatcaagtagcccaatcgtcattttaatatgatatgtgttgttaaatgttttttgtaatgtaaaataatcattactaaaaaatttatcactaccaatactgtgtacatcccattgtaatgcgtcttgtactttttttaataattcttgcatggcttgttttgctaaagcgagcagtgaactaccactgtcaccactactaccactgtcagacgaatcactaggtgaaccacctttaccgtctaatttaccaccccatgctaaaatagtatttgcaccgtctaaaaaaggattaccatagttttgtactttattatatgacgctttcaaacctaggggataatatgccgcccaagtagccgctgctgttaatggaatatacgcacgtccgattgtacctgctttcatatttttagcaaaatctgcattaccttttctttgtacgtcttgaggtacaaagtgaacgatgttacctgcgtcataccaagacggttgtcctgcttgttttgattgtgatactaattttcttgcaatgaatttagcgtctgttaaatagtcacctcgtgcagatgtatggttcaaccaacctaaaccagcgctatacccttcatttttttcatatacagcaaaaagagtaggtgacacacctatctcttttactgcttttaatacttgtctgattttactttcattaccacctagccatacattaaagcgtccatacccttttactttagggactaactggtctatcgttaaaccgaaatcatcattaatatacgaatgcgtaaatttatctatcttctcttggtcgttcattattatcacccttttcagaatcgtttttaattactcttaatttatctttaatttgttcaggcactaatacgtccatttcagcacaattttcaacaatagatagtccctcatttgcgatataatagaaaatcgtaatcatgagtaaaccaccttttaattgtaaaatctggtcaatgatgttagctaaaatgataatacagaatatcaataattttttagcaaaacctttcattgattttttagaccatagattattatttttaattgctttagcaaaaccagtaacaacatctataatcatcaaaacaaataaaaaatatagtaactttaaatcacctgcatatatgaacatatgaaatgcttctgtgtccgtaaatcttaattttacctcattcattttatacaccttctctaaatttattatttaacgggttctgtaacattggattacctgaaccgtcattatgccaaaatctcacaccagattctaaaattgcttttaattgttccattaacatagggtcaatgtcacgtatggtatacgtacctgtacattttaaatagttgcatacagtcatgctgttaataggttcaatgaatgtattatagtcatttacttcaaaaccaaacaacatataatatttttgtaaaaatgtaatttctttaggtgacggtacactaattttcatcgttaaaccgttaatgctatttgcaatttggaatgcgtttcccatttctgattctgtcacagatggtggttgtaaggctaaatctttatattctgcctgttgttgtttgtagaaattatattcttcattaaacttaccaaataaagcggttggacttaaattacttgctacacttacagcgtcataaaaacgtgattttgggtcactaccatttaatacattatctatacgacttgtgattaattgactttctgcattacgctgtctattggcttgttgtgattgtcctaaaattccgttattaattaatataggcacttgcgcaaaactattaaatgttatattggtatttaagaatgaacctgtatcaattaatatatctttatttttagcaagtatcggtctatcgttttcagcactgttataatcaactggatatactcgcacttcattatgataaccaatgatggattttgtacgtaacttaacacctgttttttgtgaaattttaccagcgtcaagtaacattgtgttaccgttccagtcataaaattcaatcgtcatgtactcattacgtatcatatgtttaaactcgtcttttttagacaacatcatctcttgaagctttgtgaaacttaatgataaatcgtttaaactccattcttttgattttccaccctgttttaatgtctttaatccagtaattttttcacttgtcttaacgtcctctaaatcttttgtattaataaaatctttaggtaacatttgaaccttttgaaagttttgtgtaatccatggatatgcactcattttatccataaagttaataaagtcaccatattccataacgtataagttgactggcgatgtgatattgtcatatatcgtacctttagacgtatctaagtttggctcttttttcgtaccaaatttctttgataaatcagcgcttgactggaataacactaaattttccaaatactgttgcatttggttatacacatagtttttatttgatacttttaacacatcatcattgttacgtaacatcggcaacatatagttatacgtacgctttgataagtgttgacgttcaatattaacgtttgaaagttgttctaatacattaccttgtgtatacgtcataatagtatcaatcacaaaatatatttttaccacaacatcattcacatattcgatttgattcacaaaagcgtaatagcgtctatcctcaaaatctgataaaaacgtcatgtagttaatcccttgtgcgtcatgccactgcatatcaacattgatttccattctatcacgtataaaattatacggttgtttggaatagtctaatgatttaaaatgacgaccgtttaaaaaataatcatcacgctctttattactattaaaatgaattgtattttgatagtctgtaaacggtgtgttatagaaaaatttaaaatttgttaattttctcatttttacctccataaaaaatagtcgtataaataatttatacgactattataacatttttattcaatgatttgtgtatctattgcaaaacgtttatctccatttgttaagtcactatcgctataatttgatgtaacaaaatgtaattcattattaaagtttaaatataatcttgtattcatcattttattatcaatcgcacattgtgtgtagtgatgtgttgattttaagtttgcgttaatcgtacctaatttaatatcaccgtttttcttaatcccttttaataccccttttaattgtatggttttaacaccattaattgttacaatacgatattgcggtgcgggataacccccgttgctatcacttgcaacaataccactttcaagttgcacatcttgccaacctgtatcattaaattgtaattttgcactgttaattttttgatcaaaattttgttcaatttctgatttagattgtgcaattttagtatctatatttaagttatccacttttgttgataaaacgcttatacttgattcgtttgttgatgttttttgttttaaatcactaatatcattatcatattttgataaatcaatatgaccgtttccgtcaacaactggtctgtcttttaattcttgaataactttttcaatttttgatattttatcattatttgtttttaaagtagcgatgtcagatttaattgaattaatatcctgtgtataatctttttggttaatactgtttaattttgtttctaactcttttatcttatcaaggttggtatttgctttgatgtcattaatggtttgttctaaactttcaagtttcccagaacttgaattttgttttaacttattaatatcctcttgtatttcttgaattgtgttgtcattgttttgtttagattttaataattcaatttgactttctatgtcttttattttatcaagattaacactttttttaacttcagctaattctctttttaatgcgtcaatgttttctgcaccagtatttgatttaattatattaatttcatttgtgtttcgtcctacactatctttagtagcgtttaaagattgtgtaagtgtttcatatttatcatcatactttaacattgatttttcaaattcatttaattgtgtttgatgttgttctaaactttcatttaatatgacatttttttcttttaatgaatcaatgtcttttttattactatcaatcattggttggaatttttttattttctctagaaatgttgatattttttctttgttatcattaattgcaatatcatgatgttctatttgaccactgtatttattaatcaatgtttttaaatcattataaaatgttaatttataataaccagtatcagtacggacataaatatgtccgtctgatgtactgattaagtcattttcttctgttaaaaaatctgctaacctgtctattgtttcaacttgtcttaaacttcttacgattctatcagccattgttcacacctcttatttgtatcgtttccaactaaactcaaagaaaaaacctaaaatacccattatgagaaaaccccccaaggaataccaacactataactattacccgttttaccgttccattttcttactggtaaataataacgtgtaccttgccagttgtaaccaatccatacatacccatctgataaacaaacttcgtcatatggtgtataaccatttggttggaaccaatatccattaggttcacttaatttaggactacctacacgtgcaaatattggtaaaaatccacatgtaaatgttgcattttcatttctgtaatatgtgccatattggttttgtttccattttccgaatgtgtttacttttgatgtttctaattcgttgctgttactagcagaaaatttaggtctaataaagtgtgttacaccgtcataataatgtgttcttattgttgctttttcccaaccgtcaaacccaccacctaaccagttttgctctaaacatgtataataatctaaattaccacttaacacacattgaatatgtccatattgtccatctgtatatacaccaacatcccctaattgtggtttaaagttcggtgtattttcatacaccattgctaaacctttaaagtcattattgattgcgtctttagcgttaccccacatacgaactttaccgtctgtaatgtaatatatataagcaacagctaagtcagcgcattgataaccaaatgctaaatcaaagtccacacctacaccctcatgcttatatatccattcttttgcttgttgttgtgatttcatgaaacattatcctttcttaacccaactatattgacgtttttttgtatctgcattaacgttactaaagaattctttatgttcggacacattagcctctaatgtttgtcttacttcaccgacagcgttaccacttgaaacacgtaaccatgcacccacttttttaatttcttctggtgcgtctctaaacaattccatttggttaccagtaatataatattcaccaggtgtcgtaacgtaagctatccagttattgtattgacttgcttctaaatactcttgatatggtgcgtctgttttgattgttgtccataaaccataatcccattttaatgtaaatacatcgagcgtcataccacgcatgattttaaccatttttcgaccagtagaaaaacgcgttaattcttgtactgtacctaatgtttgtgttgtagggtatacattgatgaaacaaccagcgtctataatttttttactaccattcattggcatatttttaagtttactagctgtaccaccgtcaatataatagaaccctgcttgtgttaagtcatttaagtcgtcaatatggtctggaattgataacgcacgtccatcgtcttttgttaatttatagttttgtgaacctctcgcacgtaatgcttcaaagtgttcatactcaccaagttgaaagaacccatataaattattgaatcgttttccaccaccgccattagtcatagcaagtaataacgatttacgttttgtttttggattggtataaatacaaataccctccggctctttaaagttatcacgtggaaaattaataccgtcttgatatgataatttaaacggataatcataaatcttttgaccagttgttaatgaatatttaccaatttgaacgtgtgaattaactgaactgttaccacttaaccagtataaatcatcaccatcaacggcaatcccttgcatccatcgattatcattgttttctgaattatcaatcgtcatttctttttctacattatcaatgtgattttttacgtcagctcttgaacgtacctgtattgtcccgtcaccgaatcttaaaacgattttgtcattttcttcatcaattaacggtgtaaacgtgtgtttgtttaaaagtgactgtggtgtataatctgttaaccctttagcctcttctaaatctaaaatataattatctttatatgcgacttgtaacagttttgctacaccgtcatgatgtaaccatattttcatttcaccgttagattgtctttctaaacctattgtagtaccgtgaccaccttgtacaatacgcatactagaaattaagtcaccgctaggcgttaatttattaatccaaaaaccttctgggttttgtgaatctgattgtgtagagtacatttgattcgtttctttatctatgtttatagattggttaacagcattacgaataccaccgaatcccataacaaactttggttcaagctcatttaattcaaaaccattaacaaaacggtcaatgtctttaattaagtctttaacttctgatttaaaatcattcatttgtttcatttctgcaactttaaataatgcaaatgcagatgtaagaccagtactatatttagtaaattcatcatgaataattttatctattgtaccgtcgtttaaccaacctctaaataagtctttcgcttggtctgggaatgctttcattaagtcgtcccaatttttgaaacgtttttttaattcattgtcatagtcccaaatacgacgtgctaatacttcaattagttttgataatcttgaaatataatcataatatgattttgaattggtattataatctgctctatcatcgtaaaacggtgtgtaacgttctctcgttttatatatttcgtctaaaaatggacgaatgtcgtcaaaatatttaaaatcgttttcattatatgccataattttccacctttaccaaatttgtaaaaaacattttttatcaaattcatttaaaattttctttcttaaatcgtatactttatcaatattatcaattaaatactgttttgaaaattgtgtacctttcgcattacctttttgattttgattacgttttgcgttttgattactttcgttacttgatttattcacagttttaccgttgtcaattgtattattatctgcaaatcgtaacgttgtgttatctacatcaatgttaacctcgctttgtggtaatgacgcataagcatttctgttcgctgtcatgccagttgaattgtctaaagatgttgcattttgatttgaggtttcatctgtattgtttgttgtatcttcattatgttctgtaaaaccttgtgattgtagatatttttcaacttcgcttgatgaataaaccacattcaaataatcctcatgtgtgatacatacagtaatcacttgcatgccaaaagcttcaactgtttgtctgttgatttctctatctaaaaagtgtattgtaaatgattttttaaaaagtaagtcagataagtcatctttaagtttaaaacctttaaacactttttcattaacgatggctaaaacgtctttgtcaaacttcaacattttttgcatgaattgaaattcatcatcataaaacgttaatttatcattatttacaaattcattaaaaccttttttaattaattctgatttaataaaatcaaataaagtcattgtatatctagccattgtattcactactttcatcattagacaatgtatctatcattgtgatttctgaagtaacttcatcgtcgtaatacggtttaatatctaaaccataacgttttgataagaatgtaatcggttcacgaccttttaaataaatattactatttgatgtggtaaaacctcggttgctttttgcctcttcgtccgaaacaccgctttccttatccactgctagtgagttaatacctaaatagttacttaattcactaattttattttggtattcgcgtttcatctcagttagtgctggaatcacactattactggttaaatctatgatatcatcatcggcgttaaacataggtgacattttaacaaatggtgcaccgttgtatatttccgatacaagttgattaactgactcatcattaatgtctgatttaaatattttgctaaattttgcttgcataattaatgagaatctagataaaacaacctcagataattcatcagtataatgttctataatttctatatcactattatattgaattggtttattttgcatgacaacaaagttaccactcatacagttatcatatattttatgaatctgtaagcattcatctggtattaaatagtctggaacaatgaaataaatatcatcttttgttaatcgtttttgaaattgaaagttaaagtttgatgaaaaatttggtgcttgattaaagtaagtattatttacgtaaccaagaatcataatttgttcatttcttgctttgccgaccactacattgatgttttgtcttaatgctgattctaattgaataaaatctataccaaccgtatcacgattggtatagttgatgagtagtggtaaaaattccaaataacgattaaacataagacgtttaaatctgttgcgatgttctacaactcttttgttgatttcttttgataattcaacctgtacacctttattatgtttagtcatttatagcacctctattattctgttcttggtgttacatcttggtcagtaattaaaattttattaaagaatgggctaatggctttaaatgaatagtaatgaatccagtgtgtgacttcatcaaattcaccattatagaatggttgttttaacataccttttgtgtaacgtttatatttaattgaattaatatccaaaataaacgcgtataaatctgattttggtttaatttcttcaacattatctttaaactctgatagttttgacacatcataagtgaatactgaaccaactggaattgtatcacctttatgagtttgataatcaccgtaagcacgtaagaaagctactgattcatcacttgatacgacaatatctttagtgactttgaaaacaccacctaggtcgtcaaaactgataacgtggtctgtaaagtcaatccctgctacttggaatgtgttcgcaatctttgtatctaaaagataagattttaagctatcagtcgttaaaataacaatatcttttaattttgaaactgttgtatattgtccgattgcaccacctgaagcacgatgaacttcattatatttagcgctgttgttttgtaagttaagaatagcttcaaaaactttacttgctaaatcttcttttgatgttgctttacgtacatttgattcagataattgattcaatgagtaatcaactaacattgcacgcatttctttttcttctaatacgttaatatcagaaattttctttttatagacacctaatgcataattagtagcgtctgctaatgtttggaaattgaaacgtgtgtcattgttatttaatgtaaatttttgtttcttcacaataccactaccatataacttagtagccatacgtggatagttacgtttcaacattagttcttcatttttagataagtccatgttaataggtactgtatccataattacatattcttcactgtattgacctataaagtcctgctctttagctaaccaattaaaacggttacctaatgcaatatcgattaataacgtttcattaatcttagggaataaaaatttatttacaaatgtttcaaacattgtattagaattatcccacttatcgccaaacgtccatgattttgaataagtatgattaaagtcttgtaatgcagatttagctgactttgcaactaatagtgctgtttcgttttttgtactcttttctgccatgatttattattcctcctcaacatcgccagtaaatgactgttttgaaagtgaatgaatttgtacaccataactatcttcacttttatttgtatcaattgacatattttcatttaattctgttcgtttatttaatcttgaatcttcatatgatgtacccatcatagaacgcatgttgttaccctcgtacatgtttaagttcctcctaatctaaatctaatttatcgacaagttcttcatctgaatagtctttatcattgttatctgtttcttttgattctggttgtggttgtggttgtggttgtggttgttgcatttgtgatgtttcaaaattagtaaatcgttgttctaatgaagcgatacgttgttctaaaacaactgggtctaattttgcacaatcttcatctgttgtagtaggttctaatttgttttcattttcttcttcgattgtttctactgttttatcttcagttgattcttcagttgattcttcagttgattctgaagtttcttcagttgattctgaagtttcttctttgtcgtctggttttacgatttcatcaaattctgtcattttgacacctccaaatattttataactaattatatcatagaatatttaaataagtaaattaaatttattttattttcaaatcataactttgaataaaagtcaatagatacataaattttgtatttaatgaatatgtaataggttagataagttggaaaagtagacgcacagtttttataagtttagtaaagaaatgatatgttaatttataagttttgatttgtataatcgtttattttaaacggtggggaggtgtaaatttacaataactt

SEQ ID NO: 112 - DNA, 18145 bp, Rosenblumvirus sp.
  source 1..18145: mol_type = genomic DNA
gaaaaagtttttgtaaaattacacctccccaccgtttaaaataaacgattatacaaatcaaaacttataaattaacttatcatttctttactaaacttataaaaactgtgcttctacttttccaacttatcaaacctataacatattcataaaatacaaaatatatgtatctattgacttttattcaaaattatgatttgtatttaaaatctaatttcttctattaaatagtatttttaaattatttaaactttttaagaaaaaccattgacaaaacttttaaacgtttgctatactatgtatgtaatcaaatcaaggaggtaacaaaatggaaaatgtacaacctttacaaacttacattttaaaaaatggtaatatagttattgttatgggtaatacatcaacttatgaattaacattatttgtacttgaaaaggacgattttgaacaattagaccataattcacctaaaaaaatcgttgatgaattaaggaatgaaatcaatgatttaaggagtgataataatggttaatgttgataatgcacctgcagaaaaaggtcaagcatatactgaaatgttgcaactattcaataaacttattcaatggaatccagcttatactttcgacaatgcaattaacttagtatcggcttgccaacaactattattaaactataatagttctgttgttcaattcttaaatgatgaactaaacaacgaaactaaaccagaatctattttatcttacattgctggtgatgacccaatagaacaatggaatatgcacaaaggattttatgaaacgtataacgtttacgttttttagaaaggagtgatataataatgaaacctgatgatattgttacattacgaattaaaggttatattcttcactatttagatgataaaaatgaatatgttgaagaatttattccacttcatgagtatcatttatcaaaaacacaagcaaaagatttattacctaattcacacaaacttttatccactacacgcacaacgaaaacaattcaagtttattacaatgatttactacaaatttcaattccagaaagcaaataatttaaataagaggagaaataaaaatgacaaacgtaaaagatattttatcaagacaccaaaacacattagcgagatttgaatttgaggaaaaagaaagagaatttattaaactatcagaattagtagaaaaatacggtatgaaaaaagagtatatcgttagagcattattcacaaacaaagaatcaaaattcggtgaacaaggtgttatcgtcactgacgactataacgtaaacttaccgaatcacttaactgaattaattaaagacatgcgtcaagacgaggacgttgttaacattatcaatgctggtgaagtgcaatttacaatttatgaatatgaaaacaaaaaaggtcaaaaaggttactcaatcaactttggtccagtatcattttaatacaattttataggggatatttatcccctatttttatgaggtgctaaacaatggaaaaaatatacactgccgtattattatacaatgtatcaattaatgaaacatatgaacatgaaattgaacaattcgaaaaaataaataaagttaaggtaatatatagttattttgacgcaaacttttacaaaaaaggtgcatataatctttgtgtaaaatacattaaggagatataaaatgaatattacaacaatattaaacacaaaaaaattaattaattatattttagataatagagattgttttatgaataaaataacaaaatttgaatcactaagtggaaaatgtgttgtttttgttagatacggtgaaatttctattgaatactatgatagtgatacaaaatacaatgatttatttactttagacattgacgttgatgttcgtacatatagttttagttgtcttgaggttttttatcgagaacatttaaacccattatataaaaaagaagtttttatggattgtactattgatgacgtattagaatatttcgagaaaccaatagaaagtaatataacaataatttttcaaaacaaagtgatatataataacgggaacgtgatagaacatgactaatatattaaacatagctattattttccttttagcatttttaattacacttgtaatacttatgacaatgcatatacgtgtgtcatttggtgttttatttactacattgattatattctacattatctttttagtggttatatatgggttatatggaggtcgttagcaatggttagacatacgtccgaaatggataaatggaaaaaagaaagagacgcaagaaaagagcaggaaaaagaattgtttttaaatgattttagtactgttaattttaaatttgatgataaagatttacaagaggcgtacatagacacatggaaacatttcgcacatttgccctattttccaaaagaaagaaacgtgtcatatgcaaatgccgtatcattggtaagaggtaaaagacatgaacaattaaactatatacttgaaatatataaccgtaaagatgaatctaataataaaaacgctaaaaaacataaatatgctttatatgaattacaagctaaaaataataattcttctatgtataaatatattaaagaaattgacactttatacaaagaaattggtaaatcagacagaccagtgactactattgatgataaagatgtgaggtataactttttatattatgcaacatttgaagagtaattttaatactgtaaacgacatcataaactattataaggagcaaaaacatggtgaaacaaaatcgtttagacatggtaagagattatcaaaatgctgtcaatcatgtcagaaaaaaaataccagataactataatcaaatagaattagttgatgaactcatgaatgatgatatagactattacatatctatttcaaaccgttctgacggaaaatcgttcaactatgtttcattctttatttatttagctataaaacttgatattaaatttactttattatcacgtcattatacattacgtgacgcttatcgtgattttattgaggaaatcatagacaaaaacccactattcaaatctaagcgtgtcacattcagaagcgctagggactatttagctatcatctatcaagataaggaaatcggtgtgattacagatttgaatagtgcaactgatttaaaatatcattctaactttttaaaacactaccctatcattatatatgatgaatttttagcacttgaagatgactatttaattgacgagtgggataagttaaaaacaatttatgaatcaatcgaccgtaaccatggtaatgttgattatattggctttcctaaaatgtttttactaggtaatgcagtcaacttttcaagtcctatattatccaatttaaatatatataacttattacaaaaacataaaatgaacacatcacgactttacaaaaacatttttttagaaatgcgaagaaacgattacgtaaatgaaaagcgtaacacacgggcattcaattcaaacgatgacgctatgactactggcgagtttgaatttaacgaatataatttggcagatgataatttaagaaatcatatcaatcaaaacggtgattttttctatattaaaactgacgataaatatataaaaattatgtataatgttgatacatttaatgctaatattattgttataccttatacaaaacaatatgaattttgtactaaaatcaaagatatagatgacaatgttatttatttaagagaagatatgttttataaagaaaacatggagcgttattattacaatccaagcaatttacattttgataacgcttactcaaaaaattacgttgttgataatgatagatatttatatttagatatgaataaaattataaaatttcatataaaaaatgaaatgaagaaaaatatgagtgaatttgaaagaaaagaaaaaatatatgaagataactatattgaaaatacaaagaagtatttaatgaaacaatacggcttataaaaggtgtgtaagattatgggattactagaatgcatgcaatatcataaacatgaacgtcgaatgattttatactgggatatagaaacattagcgtacaataaagttaacggacgaaaaaaaccaaccaaatataaaaacgtaacgtattcagtagcaattggttggtttaatggttatgagattgatgtagaagtatttcctagttttgaatcgttttatgacgcattttatacgtatgtgaaacgacgtgatacaatcactaagtcaaaaacagatattatcatgattgcacataactgtaataagtatgacaaccattttttacttaaagataccatgcgttattttgataatatcacacgtgaaaatatatatttaaaatctgcagaagaaaacgaacacacactaaagatgcaagaggctactattttagctaaaaatcaaaatgtgattttagaaaaacgtgtgaaatcgtctattaatttagacttaacaatgtttttaaatggatttaaatttaatattattgataactttatgaaaacaaatacatcaattgcaacattaggtaaaaagttgcttgacggtggttatttaacagacgaccaacttaaaacagattttaattacacgatatttgataaagataacgacatgtcagatagtgaagcctatgactatgccgtaaagtgttttgctaaactcacacctgaacaacttacatacattcataatgacgttattatattaggtatgtgccatattcattatagtgatatatttccaaattttgactataacaaattaacattttcattgaatattatggaatcgtatttaaataatcaaatgacgcgttttcagttactcaatcaatatcaagatattaaaatatcatatacacattatcatttccatgatatgaatttttatgattatatcaaatcattttatcgtggtggtttaaatatgtataacactaaatacataaacaaacttattgatgagccttgtttttctattgatatcaattccagttatccttatgtgatgtatcatgagaaaattccgacatggttatacttttatgaacattattcagaacctacattaatccctacttttttagatgatgacaattatttttcattatataagattgataaagatgtatttaacaatgatttattaattaaaatcaaatcacgtgtattacgtcaaatgattgtaaaatactataataatgataatgattacgttaatattaatacaaatacattaagaatgattcaagacattacgggtattgattgcacgcatatacgtgttaattcgtttgtgatatatgaatgtgaatactttcatgcacgtgatattatatttcaaaactattttattaaaacacaaggtaagttaaaaaacaaaatcaacatgacatcaccttacgactatcatattactgatgacatcaacgaacacccttactcaaatgaggaggttatgttgtctaaagttgtacttaacggattatatggcatacctgcattacgttcacattttaacttattccgtttagatgataacaacgaactatataatatcattaacggttacaaaaacactgaacgtaatatattattctctacatttgtcacatcacgttcattatataacttattggtacctttccaatacttaactgaaaatgaaattgacgacaattttatttattgcgatactgatagtttgtatatgaaatccgttgttaaacccttattgaaccccagtttattcgacccgatagccttaggtaaatgggatattgaaaacgaacagatagataagatgtttgtactgaatcataaaaaatatgcatatgaagtgaatggaaagattaaaattgcttctgctggtataccgaaaagcgcctttgatacaagcgtcgattttgaaacctttgtacgtgaacaattctttgacggtgtgataatagaaaacaataaaagtatctataacgaacagggtacgatatcgatttatccgtctaaaacagaaattgtatgcggtaatgtatatgatgaatattttactgatgaacttaatatgaaacgtgaatttatcttaaaagacgctagagaaaattttgaccatagtcaatttgatgatattctttatattgaaagtgacatcggttcattctcacttaatgacttatttccagttgtacgttcagtgcataataaatctaatttgcatatattaaaacgtgaacacgatgaattaaaaaaaggcaactgttaaataacagtcgcctttttcttttgatataacatgaaaaatgtgtacgaaaattgattatgttttgtattttatttactagcattactagcatgttttcattatagcatagttaattaagcaataccactgaagaatacaatattatcaccagcgttatgaggtacaccattaatcaatgtatataatacaacccgtgacggtgccacgtatggtgggacgttatagtttgctactaagaatgaaccatcgtcaaatactgctacaacgacacctgtgtgaccaatgccatatgctgttgcttgtaagtatggtggtttacttgaaaaaccataccctactgttggattatgtgttgtttttgcacctaactttttatatacgtaccacacacgttgaccgtttgttatttgaccgtcgtctgttggttgtcttttaccatgtaattgtgacatatatgcccatgttaattctgtacattgtcctgcattacccgtttgaggaaatatgttacctggtttgtacaagtattcttttttgaataaaggtacaccaattgcttttttatatttttctggtaactgtgcatacgtccagttaccaccaatgacgcgtccacttttaccatttggtttgactgacttaccactaattggtttatggtccccgtcatcatcagtagggtttgaactactatccccactatctacttgcacactatcaatcagtttttttaatgaatcaagtagcccaatcgtcattttaatatgatatgtgttgttaaatgttttttgtaatgtaaaataatcattactaaaaaatttatcactaccaatactgtgtacatcccattgtaatgcgtcttgtactttttttaataattcttgcatggcttgttttgctaaagcgagcagtgaactaccactgtcaccactactaccactgtcagacgaatcactaggtgaaccacctttaccgtctaatttaccaccccatgctaaaatagtatttgcaccgtctaaaaaaggattaccatagttttgtactttattatatgacgctttcaaacctaggggataatatgccgcccaagtagccgctgctgttaatggaatatacgcacgtccgattgtacctgctttcatatttttagcaaaatctgcattaccttttctttgtacgtcttgaggtacaaagtgaacgatgttacctgcgtcataccaagacggttgtcctgcttgttttgattgtgatactaattttcttgcaatgaatttagcgtctgttaaatagtcacctcgtgcagatgtatggttcaaccaacctaaaccagcgctatacccttcatttttttcatatacagcaaaaagagtaggtgacacacctatctcttttactgcttttaatacttgtctgattttactttcattaccacctagccatacattaaagcgtccatacccttttactttagggactaactggtctatcgttaaaccgaaatcatcattaatatacgaatgcgtaaatttatctatcttctcttggtcgttcattattatcacccttttcagaatcgtttttaattactcttaatttatctttaatttgttcaggcactaatacgtccatttcagcacaattttcaacaatagatagtccctcatttgcgatataatagaaaatcgtaatcatgagtaaaccaccttttaattgtaaaatctggtcaatgatgttagctaaaatgataatacagaatatcaataattttttagcaaaacctttcattgattttttagaccatagattattatttttaattgctttagcaaaaccagtaacaacatctataatcatcaaaacaaataaaaaatatagtaactttaaatcacctgcatatatgaacatatgaaatgcttctgtgtccgtaaatcttaattttacctcattcattttatacaccttctctaaatttattatttaacgggttctgtaacattggattacctgaaccgtcattatgccaaaatctcacaccagattctaaaattgcttttaattgttccattaacatagggtcaatgtcacgtatggtatacgtacctgtacattttaaatagttgcatacagtcatgctgttaataggttcaatgaatgtattatagtcatttacttcaaaaccaaacaacatataatatttttgtaaaaatgtaatttctttaggtgacggtacactaattttcatcgttaaaccgttaatgctatttgcaatttggaatgcgtttcccatttctgattctgtcacagatggtggttgtaaggctaaatctttatattctgcctgttgttgtttgtagaaattatattcttcattaaacttaccaaataaagcggttggacttaaattacttgctacacttacagcgtcataaaaacgtgattttgggtcactaccatttaatacattatctatacgacttgtgattaattgactttctgcattacgctgtctattggcttgttgtgattgtcctaaaattccgttattaattaatataggcacttgcgcaaaactattaaatgttatattggtatttaagaatgaacctgtatcaattaatatatctttatttttagcaagtatcggtctatcgttttcagcactgttataatcaactggatatactcgcacttcattatgataaccaatgatggattttgtacgtaacttaacacctgttttttgtgaaattttaccagcgtcaagtaacattgtgttaccgttccagtcataaaattcaatcgtcatgtactcattacgtatcatatgtttaaactcgtcttttttagacaacatcatctcttgaagctttgtgaaacttaatgataaatcgtttaaactccattcttttgattttccaccctgttttaatgtctttaatccagtaattttttcacttgtcttaacgtcctctaaatcttttgtattaataaaatctttaggtaacatttgaaccttttgaaagttttgtgtaatccatggatatgcactcattttatccataaagttaataaagtcaccatattccataacgtataagttgactggcgatgtgatattgtcatatatcgtacctttagacgtatctaagtttggctcttttttcgtaccaaatttctttgataaatcagcgcttgactggaataacactaaattttccaaatactgttgcatttggttatacacatagtttttatttgatacttttaacacatcatcattgttacgtaacatcggcaacatatagttatacgtacgctttgataagtgttgacgttcaatattaacgtttgaaagttgttctaatacattaccttgtgtatacgtcataatagtatcaatcacaaaatatatttttaccacaacatcattcacatattcgatttgattcacaaaagcgtaatagcgtctatcctcaaaatctgataaaaacgtcatgtagttaatcccttgtgcgtcatgccactgcatatcaacattgatttccattctatcacgtataaaattatacggttgtttggaatagtctaatgatttaaaatgacgaccgtttaaaaaataatcatcacgctctttattactattaaaatgaattgtattttgatagtctgtaaacggtgtgttatagaaaaatttaaaatttgttaattttctcatttttacctccataaaaaatagtcgtataaataatttatacgactattataacatttttattcaatgatttgtgtatctattgcaaaacgtttatctccatttgttaagtcactatcgctataatttgatgtaacaaaatgtaattcattattaaagtttaaatataatcttgtattcatcattttattatcaatcgcacattgtgtgtagtgatgtgttgattttaagtttgcgttaatcgtacctaatttaatatcaccgtttttcttaatcccttttaataccccttttaattgtatggttttaacaccattaattgttacaatacgatattgcggtgcgggataacccccgttgctatcacttgcaacaataccactttcaagttgcacatcttgccaacctgtatcattaaattgtaattttgcactgttaattttttgatcaaaattttgttcaatttctgatttagattgtgcaattttagtatctatatttaagttatccacttttgttgataaaacgcttatacttgattcgtttgttgatgttttttgttttaaatcactaatatcattatcatattttgataaatcaatatgaccgtttccgtcaacaactggtctgtcttttaattcttgaataactttttcaatttttgatattttatcattatttgtttttaaagtagcgatgtcagatttaattgaattaatatcctgtgtataatctttttggttaatactgtttaattttgtttctaactcttttatcttatcaaggttggtatttgctttgatgtcattaatggtttgttctaaactttcaagtttcccagaacttgaattttgttttaacttattaatatcctcttgtatttcttgaattgtgttgtcattgttttgtttagattttaataattcaatttgactttctatgtcttttattttatcaagattaacactttttttaacttcagctaattctctttttaatgcgtcaatgttttctgcaccagtatttgatttaattatattaatttcatttgtgtttcgtcctacactatctttagtagcgtttaaagattgtgtaagtgtttcatatttatcatcatactttaacattgatttttcaaattcatttaattgtgtttgatgttgttctaaactttcatttaatatgacatttttttcttttaatgaatcaatgtcttttttattactatcaatcattggttggaatttttttattttctctagaaatgttgatattttttctttgttatcattaattgcaatatcatgatgttctatttgaccactgtatttattaatcaatgtttttaaatcattataaaatgttaatttataataaccagtatcagtacggacataaatatgtccgtctgatgtactgattaagtcattttcttctgttaaaaaatctgctaacctgtctattgtttcaacttgtcttaaacttcttacgattctatcagccattgttcacacctcttatttgtatcgtttccaactaaactcaaagaaaaaacctaaaatacccattatgagaaaaccccccaaggaataccaacactataactattacccgttttaccgttccattttcttactggtaaataataacgtgtaccttgccagttgtaaccaatccatacatacccatctgataaacaaacttcgtcatatggtgtataaccatttggttggaaccaatatccattaggttcacttaatttaggactacctacacgtgcaaatattggtaaaaatccacatgtaaatgttgcattttcatttctgtaatatgtgccatattggttttgtttccattttccgaatgtgtttacttttgatgtttctaattcgttgctgttactagcagaaaatttaggtctaataaagtgtgttacaccgtcataataatgtgttcttattgttgctttttcccaaccgtcaaacccaccacctaaccagttttgctctaaacatgtataataatctaaattaccacttaacacacattgaatatgtccatattgtccatctgtatatacaccaacatcccctaattgtggtttaaagttcggtgtattttcatacaccattgctaaacctttaaagtcattattgattgcgtctttagcgttaccccacatacgaactttaccgtctgtaatgtaatatatataagcaacagctaagtcagcgcattgataaccaaatgctaaatcaaagtccacacctacaccctcatgcttatatatccattcttttgcttgttgttgtgatttcatgaaacattatcctttcttaacccaactatattgacgtttttttgtatctgcattaacgttactaaagaattctttatgttcggacacattagcctctaatgtttgtcttacttcaccgacagcgttaccacttgaaacacgtaaccatgcacccacttttttaatttcttctggtgcgtctctaaacaattccatttggttaccagtaatataatattcaccaggtgtcgtaacgtaagctatccagttattgtattgacttgcttctaaatactcttgatatggtgcgtctgttttgattgttgtccataaaccataatcccattttaatgtaaatacatcgagcgtcataccacgcatgattttaaccatttttcgaccagtagaaaaacgcgttaattcttgtactgtacctaatgtttgtgttgtagggtatacattgatgaaacaaccagcgtctataatttttttactaccattcattggcatatttttaagtttactagctgtaccaccgtcaatataatagaaccctgcttgtgttaagtcatttaagtcgtcaatatggtctggaattgataacgcacgtccatcgtcttttgttaatttatagttttgtgaacctctcgcacgtaatgcttcaaagtgttcatactcaccaagttgaaagaacccatataaattattgaatcgttttccaccaccgccattagtcatagcaagtaataacgatttacgttttgtttttggattggtataaatacaaataccctccggctctttaaagttatcacgtggaaaattaataccgtcttgatatgataatttaaacggataatcataaatcttttgaccagttgttaatgaatatttaccaatttgaacgtgtgaattaactgaactgttaccacttaaccagtataaatcatcaccatcaacggcaatcccttgcatccatcgattatcattgttttctgaattatcaatcgtcatttctttttctacattatcaatgtgattttttacgtcagctcttgaacgtacctgtattgtcccgtcaccgaatcttaaaacgattttgtcattttcttcatcaattaacggtgtaaacgtgtgtttgtttaaaagtgactgtggtgtataatctgttaaccctttagcctcttctaaatctaaaatataattatctttatatgcgacttgtaacagttttgctacaccgtcatgatgtaaccatattttcatttcaccgttagattgtctttctaaacctattgtagtaccgtgaccaccttgtacaatacgcatactagaaattaagtcaccgctaggcgttaatttattaatccaaaaaccttctgggttttgtgaatctgattgtgtagagtacatttgattcgtttctttatctatgtttatagattggttaacagcattacgaataccaccgaatcccataacaaactttggttcaagctcatttaattcaaaaccattaacaaaacggtcaatgtctttaattaagtctttaacttctgatttaaaatcattcatttgtttcatttctgcaactttaaataatgcaaatgcagatgtaagaccagtactatatttagtaaattcatcatgaataattttatctattgtaccgtcgtttaaccaacctctaaataagtctttcgcttggtctgggaatgctttcattaagtcgtcccaatttttgaaacgtttttttaattcattgtcatagtcccaaatacgacgtgctaatacttcaattagttttgataatcttgaaatataatcataatatgattttgaattggtattataatctgctctatcatcgtaaaacggtgtgtaacgttctctcgttttatatatttcgtctaaaaatggacgaatgtcgtcaaaatatttaaaatcgttttcattatatgccataattttccacctttaccaaatttgtaaaaaacattttttatcaaattcatttaaaattttctttcttaaatcgtatactttatcaatattatcaattaaatactgttttgaaaattgtgtacctttcgcattacctttttgattttgattacgttttgcgttttgattactttcgttacttgatttattcacagttttaccgttgtcaattgtattattatctgcaaatcgtaacgttgtgttatctacatcaatgttaacctcgctttgtggtaatgacgcataagcatttctgttcgctgtcatgccagttgaattgtctaaagatgttgcattttgatttgaggtttcatctgtattgtttgttgtatcttcattatgttctgtaaaaccttgtgattgtagatatttttcaacttcgcttgatgaataaaccacattcaaataatcctcatgtgtgatacatacagtaatcacttgcatgccaaaagcttcaactgtttgtctgttgatttctctatctaaaaagtgtattgtaaatgattttttaaaaagtaagtcagataagtcatctttaagtttaaaacctttaaacactttttcattaacgatggctaaaacgtctttgtcaaacttcaacattttttgcatgaattgaaattcatcatcataaaacgttaatttatcattatttacaaattcattaaaaccttttttaattaattctgatttaataaaatcaaataaagtcattgtatatctagccattgtattcactactttcatcattagacaatgtatctatcattgtgatttctgaagtaacttcatcgtcgtaatacggtttaatatctaaaccataacgttttgataagaatgtaatcggttcacgaccttttaaataaatattactatttgatgtggtaaaacctcggttgctttttgcctcttcgtccgaaacaccgctttccttatccactgctagtgagttaatacctaaatagttacttaattcactaattttattttggtattcgcgtttcatctcagttagtgctggaatcacactattactggttaaatctatgatatcatcatcggcgttaaacataggtgacattttaacaaatggtgcaccgttgtatatttccgatacaagttgattaactgactcatcattaatgtctgatttaaatattttgctaaattttgcttgcataattaatgagaatctagataaaacaacctcagataattcatcagtataatgttctataatttctatatcactattatattgaattggtttattttgcatgacaacaaagttaccactcatacagttatcatatattttatgaatctgtaagcattcatctggtattaaatagtctggaacaatgaaataaatatcatcttttgttaatcgtttttgaaattgaaagttaaagtttgatgaaaaatttggtgcttgattaaagtaagtattatttacgtaaccaagaatcataatttgttcatttcttgctttgccgaccactacattgatgttttgtcttaatgctgattctaattgaataaaatctataccaaccgtatcacgattggtatagttgatgagtagtggtaaaaattccaaataacgattaaacataagacgtttaaatctgttgcgatgttctacaactcttttgttgatttcttttgataattcaacctgtacacctttattatgtttagtcatttatagcacctctattattctgttcttggtgttacatcttggtcagtaattaaaattttattaaagaatgggctaatggctttaaatgaatagtaatgaatccagtgtgtgacttcatcaaattcaccattatagaatggttgttttaacataccttttgtgtaacgtttatatttaattgaattaatatccaaaataaacgcgtataaatctgattttggtttaatttcttcaacattatctttaaactctgatagttttgacacatcataagtgaatactgaaccaactggaattgtatcacctttatgagtttgataatcaccgtaagcacgtaagaaagctactgattcatcacttgatacgacaatatctttagtgactttgaaaacaccacctaggtcgtcaaaactgataacgtggtctgtaaagtcaatccctgctacttggaatgtgttcgcaatctttgtatctaaaagataagattttaagctatcagtcgttaaaataacaatatcttttaattttgaaactgttgtatattgtccgattgcaccacctgaagcacgatgaacttcattatatttagcgctgttgttttgtaagttaagaatagcttcaaaaactttacttgctaaatcttcttttgatgttgctttacgtacatttgattcagataattgattcaatgagtaatcaactaacattgcacgcatttctttttcttctaatacgttaatatcagaaattttctttttatagacacctaatgcataattagtagcgtctgctaatgtttggaaattgaaacgtgtgtcattgttatttaatgtaaatttttgtttcttcacaataccactaccatataacttagtagccatacgtggatagttacgtttcaacattagttcttcatttttagataagtccatgttaataggtactgtatccataattacatattcttcactgtattgacctataaagtcctgctctttagctaaccaattaaaacggttacctaatgcaatatcgattaataacgtttcattaatcttagggaataaaaatttatttacaaatgtttcaaacattgtattagaattatcccacttatcgccaaacgtccatgattttgaataagtatgattaaagtcttgtaatgcagatttagctgactttgcaactaatagtgctgtttcgttttttgtactcttttctgccatgatttattattcctcctcaacatcgccagtaaatgactgttttgaaagtgaatgaatttgtacaccataactatcttcacttttatttgtatcaattgacatattttcatttaattctgttcgtttatttaatcttgaatcttcatatgatgtacccatcatagaacgcatgttgttaccctcgtacatgtttaagttcctcctaatctaaatctaatttatcgacaagttcttcatctgaatagtctttatcattgttatctgtttcttttgattctggttgtggttgtggttgtggttgtggttgttgcatttgtgatgtttcaaaattagtaaatcgttgttctaatgaagcgatacgttgttctaaaacaactgggtctaattttgcacaatcttcatctgttgtagtaggttctaatttgttttcattttcttcttcgattgtttctactgttttatcttcagttgattcttcagttgattcttcagttgattctgaagtttcttcagttgattctgaagtttcttctttgtcgtctggttttacgatttcatcaaattctgtcattttgacacctccaaatattttataactaattatatcatagaatatttaaataagtaaattaaatttattttattttcaaatcataactttgaataaaagtcaatagatacataaattttgtatttaatgaatatgtaataggttagataagttggaaaagtagacgcacagtttttataagtttagtaaagaaatgatatgttaatttataagttttgatttgtataatcgtttattttaaacggtggggaggtgtaaatttacaataactttttccc

SEQ ID NO: 113 - DNA, 18304 bp, Rosenblumvirus sp.
  source 1..18304: mol_type = genomic DNA
gggaaaaagtttttgtaaaattacacctccccaccgtttaaaataaacgattatacaaatcaaaacttataaattaacttatcatttctttactaaacttataaaaactgtgcttctacttttccaacttatcaaacctataacatattcataaaatacaaaatatatgtatctattgacttttattcaaaattatgatttgtatttaaaatctaatttcttctattaaatagtatttttaaattatttaaactttttaagaaaaaccattgacaaaacttttaaacgtttgctatactatgtatgtaatcaaatcaaggaggtaacaaaatggaaaatgtacaacctttacaaacttacattttaaaaaatggtaatatagttattgttatgggtaatacatcaacttatgaattaacattatttgtacttgaaaaggacgattttgaacaattagaccataattcacctaaaaaaatcgttgatgaattaaggaatgaaatcaatgatttaaggagtgataataatggttaatgttgataatgcacctgcagaaaaaggtcaagcatatactgaaatgttgcaactattcaataaacttattcaatggaatccagcttatactttcgacaatgcaattaacttagtatcggcttgccaacaactattattaaactataatagttctgttgttcaattcttaaatgatgaactaaacaacgaaactaaaccagaatctattttatcttacattgctggtgatgacccaatagaacaatggaatatgcacaaaggattttatgaaacgtataacgtttacgttttttagaaaggagtgatataataatgaaacctgatgatattgttacattacgaattaaaggttatattcttcactatttagatgataaaaatgaatatgttgaagaatttattccacttcatgagtatcatttatcaaaaacacaagcaaaagatttattacctaattcacacaaacttttatccactacacgcacaacgaaaacaattcaagtttattacaatgatttactacaaatttcaattccagaaagcaaataatttaaataagaggagaaataaaaatgacaaacgtaaaagatattttatcaagacaccaaaacacattagcgagatttgaatttgaggaaaaagaaagagaatttattaaactatcagaattagtagaaaaatacggtatgaaaaaagagtatatcgttagagcattattcacaaacaaagaatcaaaattcggtgaacaaggtgttatcgtcactgacgactataacgtaaacttaccgaatcacttaactgaattaattaaagacatgcgtcaagacgaggacgttgttaacattatcaatgctggtgaagtgcaatttacaatttatgaatatgaaaacaaaaaaggtcaaaaaggttactcaatcaactttggtccagtatcattttaatacaattttataggggatatttatcccctatttttatgaggtgctaaacaatggaaaaaatatacactgccgtattattatacaatgtatcaattaatgaaacatatgaacatgaaattgaacaattcgaaaaaataaataaagttaaggtaatatatagttattttgacgcaaacttttacaaaaaaggtgcatataatctttgtgtaaaatacattaaggagatataaaatgaatattacaacaatattaaacacaaaaaaattaattaattatattttagataatagagattgttttatgaataaaataacaaaatttgaatcactaagtggaaaatgtgttgtttttgttagatacggtgaaatttctattgaatactatgatagtgatacaaaatacaatgatttatttactttagacattgacgttgatgttcgtacatatagttttagttgtcttgaggttttttatcgagaacatttaaacccattatataaaaaagaagtttttatggattgtactattgatgacgtattagaatatttcgagaaaccaatagaaagtaatataacaataatttttcaaaacaaagtgatatataataacgggaacgtgatagaacatgactaatatattaaacatagctattattttccttttagcatttttaattacacttgtaatacttatgacaatgcatatacgtgtgtcatttggtgttttatttactacattgattatattctacattatctttttagtggttatatatgggttatatggaggtcgttagcaatggttagacatacgtccgaaatggataaatggaaaaaagaaagagacgcaagaaaagagcaggaaaaagaattgtttttaaatgattttagtactgttaattttaaatttgatgataaagatttacaagaggcgtacatagacacatggaaacatttcgcacatttgccctattttccaaaagaaagaaacgtgtcatatgcaaatgccgtatcattggtaagaggtaaaagacatgaacaattaaactatatacttgaaatatataaccgtaaagatgaatctaataataaaaacgctaaaaaacataaatatgctttatatgaattacaagctaaaaataataattcttctatgtataaatatattaaagaaattgacactttatacaaagaaattggtaaatcagacagaccagtgactactattgatgataaagatgtgaggtataactttttatattatgcaacatttgaagagtaattttaatactgtaaacgacatcataaactattataaggagcaaaaacatggtgaaacaaaatcgtttagacatggtaagagattatcaaaatgctgtcaatcatgtcagaaaaaaaataccagataactataatcaaatagaattagttgatgaactcatgaatgatgatatagactattacatatctatttcaaaccgttctgacggaaaatcgttcaactatgtttcattctttatttatttagctataaaacttgatattaaatttactttattatcacgtcattatacattacgtgacgcttatcgtgattttattgaggaaatcatagacaaaaacccactattcaaatctaagcgtgtcacattcagaagcgctagggactatttagctatcatctatcaagataaggaaatcggtgtgattacagatttgaatagtgcaactgatttaaaatatcattctaactttttaaaacactaccctatcattatatatgatgaatttttagcacttgaagatgactatttaattgacgagtgggataagttaaaaacaatttatgaatcaatcgaccgtaaccatggtaatgttgattatattggctttcctaaaatgtttttactaggtaatgcagtcaacttttcaagtcctatattatccaatttaaatatatataacttattacaaaaacataaaatgaacacatcacgactttacaaaaacatttttttagaaatgcgaagaaacgattacgtaaatgaaaagcgtaacacacgggcattcaattcaaacgatgacgctatgactactggcgagtttgaatttaacgaatataatttggcagatgataatttaagaaatcatatcaatcaaaacggtgattttttctatattaaaactgacgataaatatataaaaattatgtataatgttgatacatttaatgctaatattattgttataccttatacaaaacaatatgaattttgtactaaaatcaaagatatagatgacaatgttatttatttaagagaagatatgttttataaagaaaacatggagcgttattattacaatccaagcaatttacattttgataacgcttactcaaaaaattacgttgttgataatgatagatatttatatttagatatgaataaaattataaaatttcatataaaaaatgaaatgaagaaaaatatgagtgaatttgaaagaaaagaaaaaatatatgaagataactatattgaaaatacaaagaagtatttaatgaaacaatacggcttataaaaggtgtgtaagattatgggattactagaatgcatgcaatatcataaacatgaacgtcgaatgattttatactgggatatagaaacattagcgtacaataaagttaacggacgaaaaaaaccaaccaaatataaaaacgtaacgtattcagtagcaattggttggtttaatggttatgagattgatgtagaagtatttcctagttttgaatcgttttatgacgcattttatacgtatgtgaaacgacgtgatacaatcactaagtcaaaaacagatattatcatgattgcacataactgtaataagtatgacaaccattttttacttaaagataccatgcgttattttgataatatcacacgtgaaaatatatatttaaaatctgcagaagaaaacgaacacacactaaagatgcaagaggctactattttagctaaaaatcaaaatgtgattttagaaaaacgtgtgaaatcgtctattaatttagacttaacaatgtttttaaatggatttaaatttaatattattgataactttatgaaaacaaatacatcaattgcaacattaggtaaaaagttgcttgacggtggttatttaacagacgaccaacttaaaacagattttaattacacgatatttgataaagataacgacatgtcagatagtgaagcctatgactatgccgtaaagtgttttgctaaactcacacctgaacaacttacatacattcataatgacgttattatattaggtatgtgccatattcattatagtgatatatttccaaattttgactataacaaattaacattttcattgaatattatggaatcgtatttaaataatcaaatgacgcgttttcagttactcaatcaatatcaagatattaaaatatcatatacacattatcatttccatgatatgaatttttatgattatatcaaatcattttatcgtggtggtttaaatatgtataacactaaatacataaacaaacttattgatgagccttgtttttctattgatatcaattccagttatccttatgtgatgtatcatgagaaaattccgacatggttatacttttatgaacattattcagaacctacattaatccctacttttttagatgatgacaattatttttcattatataagattgataaagatgtatttaacaatgatttattaattaaaatcaaatcacgtgtattacgtcaaatgattgtaaaatactataataatgataatgattacgttaatattaatacaaatacattaagaatgattcaagacattacgggtattgattgcacgcatatacgtgttaattcgtttgtgatatatgaatgtgaatactttcatgcacgtgatattatatttcaaaactattttattaaaacacaaggtaagttaaaaaacaaaatcaacatgacatcaccttacgactatcatattactgatgacatcaacgaacacccttactcaaatgaggaggttatgttgtctaaagttgtacttaacggattatatggcatacctgcattacgttcacattttaacttattccgtttagatgataacaacgaactatataatatcattaacggttacaaaaacactgaacgtaatatattattctctacatttgtcacatcacgttcattatataacttattggtacctttccaatacttaactgaaaatgaaattgacgacaattttatttattgcgatactgatagtttgtatatgaaatccgttgttaaacccttattgaaccccagtttattcgacccgatagccttaggtaaatgggatattgaaaacgaacagatagataagatgtttgtactgaatcataaaaaatatgcatatgaagtgaatggaaagattaaaattgcttctgctggtataccgaaaagcgcctttgatacaagcgtcgattttgaaacctttgtacgtgaacaattctttgacggtgtgataatagaaaacaataaaagtatctataacgaacagggtacgatatcgatttatccgtctaaaacagaaattgtatgcggtaatgtatatgatgaatattttactgatgaacttaatatgaaacgtgaatttatcttaaaagacgctagagaaaattttgaccatagtcaatttgatgatattctttatattgaaagtgacatcggttcattctcacttaatgacttatttccagttgtacgttcagtgcataataaatctaatttgcatatattaaaacgtgaacacgatgaattaaaaaaaggcaactgttaaataacagtcgcctttttcttttgatataacatgaaaaatgtgtacgaaaattgattatgttttgtattttatttactagcattactagcatgttttcattatagcatagttaattaagcaataccactgaagaatacaatattatcaccagcgttatgaggtacaccattaatcaatgtatataatacaacccgtgacggtgccacgtatggtgggacgttatagtttgctactaagaatgaaccatcgtcaaatactgctacaacgacacctgtgtgaccaatgccatatgctgttgcttgtaagtatggtggtttacttgaaaaaccataccctactgttggattatgtgttgtttttgcacctaactttttatatacgtaccacacacgttgaccgtttgttatttgaccgtcgtctgttggttgtcttttaccatgtaattgtgacatatatgcccatgttaattctgtacattgtcctgcattacccgtttgaggaaatatgttacctggtttgtacaagtattcttttttgaataaaggtacaccaattgcttttttatatttttctggtaactgtgcatacgtccagttaccaccaatgacgcgtccacttttaccatttggtttgactgacttaccactaattggtttatggtccccgtcatcatcagtagggtttgaactactatccccactatctacttgcacactatcaatcagtttttttaatgaatcaagtagcccaatcgtcattttaatatgatatgtgttgttaaatgttttttgtaatgtaaaataatcattactaaaaaatttatcactaccaatactgtgtacatcccattgtaatgcgtcttgtactttttttaataattcttgcatggcttgttttgctaaagcgagcagtgaactaccactgtcaccactactaccactgtcagacgaatcactaggtgaaccacctttaccgtctaatttaccaccccatgctaaaatagtatttgcaccgtctaaaaaaggattaccatagttttgtactttattatatgacgctttcaaacctaggggataatatgccgcccaagtagccgctgctgttaatggaatatacgcacgtccgattgtacctgctttcatatttttagcaaaatctgcattaccttttctttgtacgtcttgaggtacaaagtgaacgatgttacctgcgtcataccaagacggttgtcctgcttgttttgattgtgatactaattttcttgcaatgaatttagcgtctgttaaatagtcacctcgtgcagatgtatggttcaaccaacctaaaccagcgctatacccttcatttttttcatatacagcaaaaagagtaggtgacacacctatctcttttactgcttttaatacttgtctgattttactttcattaccacctagccatacattaaagcgtccatacccttttactttagggactaactggtctatcgttaaaccgaaatcatcattaatatacgaatgcgtaaatttatctatcttctcttggtcgttcattattatcacccttttcagaatcgtttttaattactcttaatttatctttaatttgttcaggcactaatacgtccatttcagcacaattttcaacaatagatagtccctcatttgcgatataatagaaaatcgtaatcatgagtaaaccaccttttaattgtaaaatctggtcaatgatgttagctaaaatgataatacagaatatcaataattttttagcaaaacctttcattgattttttagaccatagattattatttttaattgctttagcaaaaccagtaacaacatctataatcatcaaaacaaataaaaaatatagtaactttaaatcacctgcatatatgaacatatgaaatgcttctgtgtccgtaaatcttaattttacctcattcattttatacaccttctctaaatttattatttaacgggttctgtaacattggattacctgaaccgtcattatgccaaaatctcacaccagattctaaaattgcttttaattgttccattaacatagggtcaatgtcacgtatggtatacgtacctgtacattttaaatagttgcatacagtcatgctgttaataggttcaatgaatgtattatagtcatttacttcaaaaccaaacaacatataatatttttgtaaaaatgtaatttctttaggtgacggtacactaattttcatcgttaaaccgttaatgctatttgcaatttggaatgcgtttcccatttctgattctgtcacagatggtggttgtaaggctaaatctttatattctgcctgttgttgtttgtagaaattatattcttcattaaacttaccaaataaagcggttggacttaaattacttgctacacttacagcgtcataaaaacgtgattttgggtcactaccatttaatacattatctatacgacttgtgattaattgactttctgcattacgctgtctattggcttgttgtgattgtcctaaaattccgttattaattaatataggcacttgcgcaaaactattaaatgttatattggtatttaagaatgaacctgtatcaattaatatatctttatttttagcaagtatcggtctatcgttttcagcactgttataatcaactggatatactcgcacttcattatgataaccaatgatggattttgtacgtaacttaacacctgttttttgtgaaattttaccagcgtcaagtaacattgtgttaccgttccagtcataaaattcaatcgtcatgtactcattacgtatcatatgtttaaactcgtcttttttagacaacatcatctcttgaagctttgtgaaacttaatgataaatcgtttaaactccattcttttgattttccaccctgttttaatgtctttaatccagtaattttttcacttgtcttaacgtcctctaaatcttttgtattaataaaatctttaggtaacatttgaaccttttgaaagttttgtgtaatccatggatatgcactcattttatccataaagttaataaagtcaccatattccataacgtataagttgactggcgatgtgatattgtcatatatcgtacctttagacgtatctaagtttggctcttttttcgtaccaaatttctttgataaatcagcgcttgactggaataacactaaattttccaaatactgttgcatttggttatacacatagtttttatttgatacttttaacacatcatcattgttacgtaacatcggcaacatatagttatacgtacgctttgataagtgttgacgttcaatattaacgtttgaaagttgttctaatacattaccttgtgtatacgtcataatagtatcaatcacaaaatatatttttaccacaacatcattcacatattcgatttgattcacaaaagcgtaatagcgtctatcctcaaaatctgataaaaacgtcatgtagttaatcccttgtgcgtcatgccactgcatatcaacattgatttccattctatcacgtataaaattatacggttgtttggaatagtctaatgatttaaaatgacgaccgtttaaaaaataatcatcacgctctttattactattaaaatgaattgtattttgatagtctgtaaacggtgtgttatagaaaaatttaaaatttgttaattttctcatttttacctccataaaaaatagtcgtataaataatttatacgactattataacatttttattcaatgatttgtgtatctattgcaaaacgtttatctccatttgttaagtcactatcgctataatttgatgtaacaaaatgtaattcattattaaagtttaaatataatcttgtattcatcattttattatcaatcgcacattgtgtgtagtgatgtgttgattttaagtttgcgttaatcgtacctaatttaatatcaccgtttttcttaatcccttttaataccccttttaattgtatggttttaacaccattaattgttacaatacgatattgcggtgcgggataacccccgttgctatcacttgcaacaataccactttcaagttgcacatcttgccaacctgtatcattaaattgtaattttgcactgttaattttttgatcaaaattttgttcaatttctgatttagattgtgcaattttagtatctatatttaagttatccacttttgttgataaaacgcttatacttgattcgtttgttgatgttttttgttttaaatcactaatatcattatcatattttgataaatcaatatgaccgtttccgtcaacaactggtctgtcttttaattcttgaataactttttcaatttttgatattttatcattatttgtttttaaagtagcgatgtcagatttaattgaattaatatcctgtgtataatctttttggttaatactgtttaattttgtttctaactcttttatcttatcaaggttggtatttgctttgatgtcattaatggtttgttctaaactttcaagtttcccagaacttgaattttgttttaacttattaatatcctcttgtatttcttgaattgtgttgtcattgttttgtttagattttaataattcaatttgactttctatgtcttttattttatcaagattaacactttttttaacttcagctaattctctttttaatgcgtcaatgttttctgcaccagtatttgatttaattatattaatttcatttgtgtttcgtcctacactatctttagtagcgtttaaagattgtgtaagtgtttcatatttatcatcatactttaacattgatttttcaaattcatttaattgtgtttgatgttgttctaaactttcatttaatatgacatttttttcttttaatgaatcaatgtcttttttattactatcaatcattggttggaatttttttattttctctagaaatgttgatattttttctttgttatcattaattgcaatatcatgatgttctatttgaccactgtatttattaatcaatgtttttaaatcattataaaatgttaatttataataaccagtatcagtacggacataaatatgtccgtctgatgtactgattaagtcattttcttctgttaaaaaatctgctaacctgtctattgtttcaacttgtcttaaacttcttacgattctatcagccattgttcacacctcttatttgtatcgtttccaactaaactcaaagaaaaaacctaaaatacccattatgagaaaaccccccaaggaataccaacactataactattacccgttttaccgttccattttcttactggtaaataataacgtgtaccttgccagttgtaaccaatccatacatacccatctgataaacaaacttcgtcatatggtgtataaccatttggttggaaccaatatccattaggttcacttaatttaggactacctacacgtgcaaatattggtaaaaatccacatgtaaatgttgcattttcatttctgtaatatgtgccatattggttttgtttccattttccgaatgtgtttacttttgatgtttctaattcgttgctgttactagcagaaaatttaggtctaataaagtgtgttacaccgtcataataatgtgttcttattgttgctttttcccaaccgtcaaacccaccacctaaccagttttgctctaaacatgtataataatctaaattaccacttaacacacattgaatatgtccatattgtccatctgtatatacaccaacatcccctaattgtggtttaaagttcggtgtattttcatacaccattgctaaacctttaaagtcattattgattgcgtctttagcgttaccccacatacgaactttaccgtctgtaatgtaatatatataagcaacagctaagtcagcgcattgataaccaaatgctaaatcaaagtccacacctacaccctcatgcttatatatccattcttttgcttgttgttgtgatttcatgaaacattatcctttcttaacccaactatattgacgtttttttgtatctgcattaacgttactaaagaattctttatgttcggacacattagcctctaatgtttgtcttacttcaccgacagcgttaccacttgaaacacgtaaccatgcacccacttttttaatttcttctggtgcgtctctaaacaattccatttggttaccagtaatataatattcaccaggtgtcgtaacgtaagctatccagttattgtattgacttgcttctaaatactcttgatatggtgcgtctgttttgattgttgtccataaaccataatcccattttaatgtaaatacatcgagcgtcataccacgcatgattttaaccatttttcgaccagtagaaaaacgcgttaattcttgtactgtacctaatgtttgtgttgtagggtatacattgatgaaacaaccagcgtctataatttttttactaccattcattggcatatttttaagtttactagctgtaccaccgtcaatataatagaaccctgcttgtgttaagtcatttaagtcgtcaatatggtctggaattgataacgcacgtccatcgtcttttgttaatttatagttttgtgaacctctcgcacgtaatgcttcaaagtgttcatactcaccaagttgaaagaacccatataaattattgaatcgttttccaccaccgccattagtcatagcaagtaataacgatttacgttttgtttttggattggtataaatacaaataccctccggctctttaaagttatcacgtggaaaattaataccgtcttgatatgataatttaaacggataatcataaatcttttgaccagttgttaatgaatatttaccaatttgaacgtgtgaattaactgaactgttaccacttaaccagtataaatcatcaccatcaacggcaatcccttgcatccatcgattatcattgttttctgaattatcaatcgtcatttctttttctacattatcaatgtgattttttacgtcagctcttgaacgtacctgtattgtcccgtcaccgaatcttaaaacgattttgtcattttcttcatcaattaacggtgtaaacgtgtgtttgtttaaaagtgactgtggtgtataatctgttaaccctttagcctcttctaaatctaaaatataattatctttatatgcgacttgtaacagttttgctacaccgtcatgatgtaaccatattttcatttcaccgttagattgtctttctaaacctattgtagtaccgtgaccaccttgtacaatacgcatactagaaattaagtcaccgctaggcgttaatttattaatccaaaaaccttctgggttttgtgaatctgattgtgtagagtacatttgattcgtttctttatctatgtttatagattggttaacagcattacgaataccaccgaatcccataacaaactttggttcaagctcatttaattcaaaaccattaacaaaacggtcaatgtctttaattaagtctttaacttctgatttaaaatcattcatttgtttcatttctgcaactttaaataatgcaaatgcagatgtaagaccagtactatatttagtaaattcatcatgaataattttatctattgtaccgtcgtttaaccaacctctaaataagtctttcgcttggtctgggaatgctttcattaagtcgtcccaatttttgaaacgtttttttaattcattgtcatagtcccaaatacgacgtgctaatacttcaattagttttgataatcttgaaatataatcataatatgattttgaattggtattataatctgctctatcatcgtaaaacggtgtgtaacgttctctcgttttatatatttcgtctaaaaatggacgaatgtcgtcaaaatatttaaaatcgttttcattatatgccataattttccacctttaccaaatttgtaaaaaacattttttatcaaattcatttaaaattttctttcttaaatcgtatactttatcaatattatcaattaaatactgttttgaaaattgtgtacctttcgcattacctttttgattttgattacgttttgcgttttgattactttcgttacttgatttattcacagttttaccgttgtcaattgtattattatctgcaaatcgtaacgttgtgttatctacatcaatgttaacctcgctttgtggtaatgacgcataagcatttctgttcgctgtcatgccagttgaattgtctaaagatgttgcattttgatttgaggtttcatctgtattgtttgttgtatcttcattatgttctgtaaaaccttgtgattgtagatatttttcaacttcgcttgatgaataaaccacattcaaataatcctcatgtgtgatacatacagtaatcacttgcatgccaaaagcttcaactgtttgtctgttgatttctctatctaaaaagtgtattgtaaatgattttttaaaaagtaagtcagataagtcatctttaagtttaaaacctttaaacactttttcattaacgatggctaaaacgtctttgtcaaacttcaacattttttgcatgaattgaaattcatcatcataaaacgttaatttatcattatttacaaattcattaaaaccttttttaattaattctgatttaataaaatcaaataaagtcattgtatatctagccattgtattcactactttcatcattagacaatgtatctatcattgtgatttctgaagtaacttcatcgtcgtaatacggtttaatatctaaaccataacgttttgataagaatgtaatcggttcacgaccttttaaataaatattactatttgatgtggtaaaacctcggttgctttttgcctcttcgtccgaaacaccgctttccttatccactgctagtgagttaatacctaaatagttacttaattcactaattttattttggtattcgcgtttcatctcagttagtgctggaatcacactattactggttaaatctatgatatcatcatcggcgttaaacataggtgacattttaacaaatggtgcaccgttgtatatttccgatacaagttgattaactgactcatcattaatgtctgatttaaatattttgctaaattttgcttgcataattaatgagaatctagataaaacaacctcagataattcatcagtataatgttctataatttctatatcactattatattgaattggtttattttgcatgacaacaaagttaccactcatacagttatcatatattttatgaatctgtaagcattcatctggtattaaatagtctggaacaatgaaataaatatcatcttttgttaatcgtttttgaaattgaaagttaaagtttgatgaaaaatttggtgcttgattaaagtaagtattatttacgtaaccaagaatcataatttgttcatttcttgctttgccgaccactacattgatgttttgtcttaatgctgattctaattgaataaaatctataccaaccgtatcacgattggtatagttgatgagtagtggtaaaaattccaaataacgattaaacataagacgtttaaatctgttgcgatgttctacaactcttttgttgatttcttttgataattcaacctgtacacctttattatgtttagtcatttatagcacctctattattctgttcttggtgttacatcttggtcagtaattaaaattttattaaagaatgggctaatggctttaaatgaatagtaatgaatccagtgtgtgacttcatcaaattcaccattatagaatggttgttttaacataccttttgtgtaacgtttatatttaattgaattaatatccaaaataaacgcgtataaatctgattttggtttaatttcttcaacattatctttaaactctgatagttttgacacatcataagtgaatactgaaccaactggaattgtatcacctttatgagtttgataatcaccgtaagcacgtaagaaagctactgattcatcacttgatacgacaatatctttagtgactttgaaaacaccacctaggtcgtcaaaactgataacgtggtctgtaaagtcaatccctgctacttggaatgtgttcgcaatctttgtatctaaaagataagattttaagctatcagtcgttaaaataacaatatcttttaattttgaaactgttgtatattgtccgattgcaccacctgaagcacgatgaacttcattatatttagcgctgttgttttgtaagttaagaatagcttcaaaaactttacttgctaaatcttcttttgatgttgctttacgtacatttgattcagataattgattcaatgagtaatcaactaacattgcacgcatttctttttcttctaatacgttaatatcagaaattttctttttatagacacctaatgcataattagtagcgtctgctaatgtttggaaattgaaacgtgtgtcattgttatttaatgtaaatttttgtttcttcacaataccactaccatataacttagtagccatacgtggatagttacgtttcaacattagttcttcatttttagataagtccatgttaataggtactgtatccataattacatattcttcactgtattgacctataaagtcctgctctttagctaaccaattaaaacggttacctaatgcaatatcgattaataacgtttcattaatcttagggaataaaaatttatttacaaatgtttcaaacattgtattagaattatcccacttatcgccaaacgtccatgattttgaataagtatgattaaagtcttgtaatgcagatttagctgactttgcaactaatagtgctgtttcgttttttgtactcttttctgccatgatttattattcctcctcaacatcgccagtaaatgactgttttgaaagtgaatgaatttgtacaccataactatcttcacttttatttgtatcaattgacatattttcatttaattctgttcgtttatttaatcttgaatcttcatatgatgtacccatcatagaacgcatgttgttaccctcgtacatgtttaagttcctcctaatctaaatctaatttatcgacaagttcttcatctgaatagtctttatcattgttatctgtttcttttgattctggttgtggttgtggttgtggttgtggttgttgcatttgtgatgtttcaaaattagtaaatcgttgttctaatgaagcgatacgttgttctaaaacaactgggtctaattttgcacaatcttcatctgttgtagtaggttctaatttgttttcattttcttcttcgattgtttctactgttttatcttcagttgattcttcagttgattcttcagttgattctgaagtttcttcagttgattctgaagtttcttctttgtcgtctggttttacgatttcatcaaattctgtcattttgacacctccaaatattttataactaattatatcatagaatatttaaataagtaaattaaatttattttattttcaaatcataactttgaataaaagtcaatagatacataaattttgtatttaatgaatatgtaataggttagataagttggaaaagtagacgcacagtttttataagtttagtaaagaaatgatatgttaatttataagttttgatttgtataatcgtttattttaaacggtggggaggtgtaaaatgacagaatttgatgaaatcgtaaaaccagacgacaaagaagaaacttcagaatcaactgaagaaacttcagaatcaactgaagaaacttcagaatcaactgaagaatcaactgaagaatcaactgaagataaaacagtagaaacaatcgaagaagaaaatgaaaacaaattaga

SEQ ID NO: 114 - DNA, 18145 bp, Rosenblumvirus sp.; identical to SEQ ID NO: 112
  source 1..18145: mol_type = genomic DNA

SEQ ID NO: 115 - DNA, 18135 bp, Rosenblumvirus sp.
  source 1..18135: mol_type = genomic DNA
ggaaaaagtttttgtaaaattacacctccccaccgtttaaaataaacgattatacaaatcaaaacttataaattaacttatcatttctttactaaacttataaaaactgtgcttctacttttccaacttatcaaacctataacatattcataaaatacaaaatatatgtatctattgacttttattcaaaattatgatttgtatttaaaatctaatttcttctattaaatagtatttttaaattatttaaactttttaagaaaaaccattgacaaaacttttaaacgtttgctatactatgtatgtaatcaaatcaaggaggtaacaaaatggaaaatgtacaacctttacaaacttacattttaaaaaatggtaatatagttattgttatgggtaatacatcaacttatgaattaacattatttgtacttgaaaaggacgattttgaacaattagaccataattcacctaaaaaaatcgttgatgaattaaggaatgaaatcaatgatttaaggagtgataataatggttaatgttgataatgcacctgcagaaaaaggtcaagcatatactgaaatgttgcaactattcaataaacttattcaatggaatccagcttatactttcgacaatgcaattaacttagtatcggcttgccaacaactattattaaactataatagttctgttgttcaattcttaaatgatgaactaaacaacgaaactaaaccagaatctattttatcttacattgctggtgatgacccaatagaacaatggaatatgcacaaaggattttatgaaacgtataacgtttacgttttttagaaaggagtgatataataatgaaacctgatgatattgttacattacgaattaaaggttatattcttcactatttagatgataaaaatgaatatgttgaagaatttattccacttcatgagtatcatttatcaaaaacacaagcaaaagatttattacctaattcacacaaacttttatccactacacgcacaacgaaaacaattcaagtttattacaatgatttactacaaatttcaattccagaaagcaaataatttaaataagaggagaaataaaaatgacaaacgtaaaagatattttatcaagacaccaaaacacattagcgagatttgaatttgaggaaaaagaaagagaatttattaaactatcagaattagtagaaaaatacggtatgaaaaaagagtatatcgttagagcattattcacaaacaaagaatcaaaattcggtgaacaaggtgttatcgtcactgacgactataacgtaaacttaccgaatcacttaactgaattaattaaagacatgcgtcaagacgaggacgttgttaacattatcaatgctggtgaagtgcaatttacaatttatgaatatgaaaacaaaaaaggtcaaaaaggttactcaatcaactttggtccagtatcattttaatacaattttataggggatatttatcccctatttttatgaggtgctaaacaatggaaaaaatatacactgccgtattattatacaatgtatcaattaatgaaacatatgaacatgaaattgaacaattcgaaaaaataaataaagttaaggtaatatatagttattttgacgcaaacttttacaaaaaaggtgcatataatctttgtgtaaaatacattaaggagatataaaatgaatattacaacaatattaaacacaaaaaaattaattaattatattttagataatagagattgttttatgaataaaataacaaaatttgaatcactaagtggaaaatgtgttgtttttgttagatacggtgaaatttctattgaatactatgatagtgatacaaaatacaatgatttatttactttagacattgacgttgatgttcgtacatatagttttagttgtcttgaggttttttatcgagaacatttaaacccattatataaaaaagaagtttttatggattgtactattgatgacgtattagaatatttcgagaaaccaatagaaagtaatataacaataatttttcaaaacaaagtgatatataataacgggaacgtgatagaacatgactaatatattaaacatagctattattttccttttagcatttttaattacacttgtaatacttatgacaatgcatatacgtgtgtcatttggtgttttatttactacattgattatattctacattatctttttagtggttatatatgggttatatggaggtcgttagcaatggttagacatacgtccgaaatggataaatggaaaaaagaaagagacgcaagaaaagagcaggaaaaagaattgtttttaaatgattttagtactgttaattttaaatttgatgataaagatttacaagaggcgtacatagacacatggaaacatttcgcacatttgccctattttccaaaagaaagaaacgtgtcatatgcaaatgccgtatcattggtaagaggtaaaagacatgaacaattaaactatatacttgaaatatataaccgtaaagatgaatctaataataaaaacgctaaaaaacataaatatgctttatatgaattacaagctaaaaataataattcttctatgtataaatatattaaagaaattgacactttatacaaagaaattggtaaatcagacagaccagtgactactattgatgataaagatgtgaggtataactttttatattatgcaacatttgaagagtaattttaatactgtaaacgacatcataaactattataaggagcaaaaacatggtgaaacaaaatcgtttagacatggtaagagattatcaaaatgctgtcaatcatgtcagaaaaaaaataccagataactataatcaaatagaattagttgatgaactcatgaatgatgatatagactattacatatctatttcaaaccgttctgacggaaaatcgttcaactatgtttcattctttatttatttagctataaaacttgatattaaatttactttattatcacgtcattatacattacgtgacgcttatcgtgattttattgaggaaatcatagacaaaaacccactattcaaatctaagcgtgtcacattcagaagcgctagggactatttagctatcatctatcaagataaggaaatcggtgtgattacagatttgaatagtgcaactgatttaaaatatcattctaactttttaaaacactaccctatcattatatatgatgaatttttagcacttgaagatgactatttaattgacgagtgggataagttaaaaacaatttatgaatcaatcgaccgtaaccatggtaatgttgattatattggctttcctaaaatgtttttactaggtaatgcagtcaacttttcaagtcctatattatccaatttaaatatatataacttattacaaaaacataaaatgaacacatcacgactttacaaaaacatttttttagaaatgcgaagaaacgattacgtaaatgaaaagcgtaacacacgggcattcaattcaaacgatgacgctatgactactggcgagtttgaatttaacgaatataatttggcagatgataatttaagaaatcatatcaatcaaaacggtgattttttctatattaaaactgacgataaatatataaaaattatgtataatgttgatacatttaatgctaatattattgttataccttatacaaaacaatatgaattttgtactaaaatcaaagatatagatgacaatgttatttatttaagagaagatatgttttataaagaaaacatggagcgttattattacaatccaagcaatttacattttgataacgcttactcaaaaaattacgttgttgataatgatagatatttatatttagatatgaataaaattataaaatttcatataaaaaatgaaatgaagaaaaatatgagtgaatttgaaagaaaagaaaaaatatatgaagataactatattgaaaatacaaagaagtatttaatgaaacaatacggcttataaaaggtgtgtaagattatgggattactagaatgcatgcaatatcataaacatgaacgtcgaatgattttatactgggatatagaaacattagcgtacaataaagttaacggacgaaaaaaaccaaccaaatataaaaacgtaacgtattcagtagcaattggttggtttaatggttatgagattgatgtagaagtatttcctagttttgaatcgttttatgacgcattttatacgtatgtgaaacgacgtgatacaatcactaagtcaaaaacagatattatcatgattgcacataactgtaataagtatgacaaccattttttacttaaagataccatgcgttattttgataatatcacacgtgaaaatatatatttaaaatctgcagaagaaaacgaacacacactaaagatgcaagaggctactattttagctaaaaatcaaaatgtgattttagaaaaacgtgtgaaatcgtctattaatttagacttaacaatgtttttaaatggatttaaatttaatattattgataactttatgaaaacaaatacatcaattgcaacattaggtaaaaagttgcttgacggtggttatttaacagacgaccaacttaaaacagattttaattacacgatatttgataaagataacgacatgtcagatagtgaagcctatgactatgccgtaaagtgttttgctaaactcacacctgaacaacttacatacattcataatgacgttattatattaggtatgtgccatattcattatagtgatatatttccaaattttgactataacaaattaacattttcattgaatattatggaatcgtatttaaataatcaaatgacgcgttttcagttactcaatcaatatcaagatattaaaatatcatatacacattatcatttccatgatatgaatttttatgattatatcaaatcattttatcgtggtggtttaaatatgtataacactaaatacataaacaaacttattgatgagccttgtttttctattgatatcaattccagttatccttatgtgatgtatcatgagaaaattccgacatggttatacttttatgaacattattcagaacctacattaatccctacttttttagatgatgacaattatttttcattatataagattgataaagatgtatttaacaatgatttattaattaaaatcaaatcacgtgtattacgtcaaatgattgtaaaatactataataatgataatgattacgttaatattaatacaaatacattaagaatgattcaagacattacgggtattgattgcacgcatatacgtgttaattcgtttgtgatatatgaatgtgaatactttcatgcacgtgatattatatttcaaaactattttattaaaacacaaggtaagttaaaaaacaaaatcaacatgacatcaccttacgactatcatattactgatgacatcaacgaacacccttactcaaatgaggaggttatgttgtctaaagttgtacttaacggattatatggcatacctgcattacgttcacattttaacttattccgtttagatgataacaacgaactatataatatcattaacggttacaaaaacactgaacgtaatatattattctctacatttgtcacatcacgttcattatataacttattggtacctttccaatacttaactgaaaatgaaattgacgacaattttatttattgcgatactgatagtttgtatatgaaatccgttgttaaacccttattgaaccccagtttattcgacccgatagccttaggtaaatgggatattgaaaacgaacagatagataagatgtttgtactgaatcataaaaaatatgcatatgaagtgaatggaaagattaaaattgcttctgctggtataccgaaaagcgcctttgatacaagcgtcgattttgaaacctttgtacgtgaacaattctttgacggtgtgataatagaaaacaataaaagtatctataacgaacagggtacgatatcgatttatccgtctaaaacagaaattgtatgcggtaatgtatatgatgaatattttactgatgaacttaatatgaaacgtgaatttatcttaaaagacgctagagaaaattttgaccatagtcaatttgatgatattctttatattgaaagtgacatcggttcattctcacttaatgacttatttccagttgtacgttcagtgcataataaatctaatttgcatatattaaaacgtgaacacgatgaattaaaaaaaggcaactgttaaataacagtcgcctttttcttttgatataacatgaaaaatgtgtacgaaaattgattatgttttgtattttatttactagcattactagcatgttttcattatagcatagttaattaagcaataccactgaagaatacaatattatcaccagcgttatgaggtacaccattaatcaatgtatataatacaacccgtgacggtgccacgtatggtgggacgttatagtttgctactaagaatgaaccatcgtcaaatactgctacaacgacacctgtgtgaccaatgccatatgctgttgcttgtaagtatggtggtttacttgaaaaaccataccctactgttggattatgtgttgtttttgcacctaactttttatatacgtaccacacacgttgaccgtttgttatttgaccgtcgtctgttggttgtcttttaccatgtaattgtgacatatatgcccatgttaattctgtacattgtcctgcattacccgtttgaggaaatatgttacctggtttgtacaagtattcttttttgaataaaggtacaccaattgcttttttatatttttctggtaactgtgcatacgtccagttaccaccaatgacgcgtccacttttaccatttggtttgactgacttaccactaattggtttatggtccccgtcatcatcagtagggtttgaactactatccccactatctacttgcacactatcaatcagtttttttaatgaatcaagtagcccaatcgtcattttaatatgatatgtgttgttaaatgttttttgtaatgtaaaataatcattactaaaaaatttatcactaccaatactgtgtacatcccattgtaatgcgtcttgtactttttttaataattcttgcatggcttgttttgctaaagcgagcagtgaactaccactgtcaccactactaccactgtcagacgaatcactaggtgaaccacctttaccgtctaatttaccaccccatgctaaaatagtatttgcaccgtctaaaaaaggattaccatagttttgtactttattatatgacgctttcaaacctaggggataatatgccgcccaagtagccgctgctgttaatggaatatacgcacgtccgattgtacctgctttcatatttttagcaaaatctgcattaccttttctttgtacgtcttgaggtacaaagtgaacgatgttacctgcgtcataccaagacggttgtcctgcttgttttgattgtgatactaattttcttgcaatgaatttagcgtctgttaaatagtcacctcgtgcagatgtatggttcaaccaacctaaaccagcgctatacccttcatttttttcatatacagcaaaaagagtaggtgacacacctatctcttttactgcttttaatacttgtctgattttactttcattaccacctagccatacattaaagcgtccatacccttttactttagggactaactggtctatcgttaaaccgaaatcatcattaatatacgaatgcgtaaatttatctatcttctcttggtcgttcattattatcacccttttcagaatcgtttttaattactcttaatttatctttaatttgttcaggcactaatacgtccatttcagcacaattttcaacaatagatagtccctcatttgcgatataatagaaaatcgtaatcatgagtaaaccaccttttaattgtaaaatctggtcaatgatgttagctaaaatgataatacagaatatcaataattttttagcaaaacctttcattgattttttagaccatagattattatttttaattgctttagcaaaaccagtaacaacatctataatcatcaaaacaaataaaaaatatagtaactttaaatcacctgcatatatgaacatatgaaatgcttctgtgtccgtaaatcttaattttacctcattcattttatacaccttctctaaatttattatttaacgggttctgtaacattggattacctgaaccgtcattatgccaaaatctcacaccagattctaaaattgcttttaattgttccattaacatagggtcaatgtcacgtatggtatacgtacctgtacattttaaatagttgcatacagtcatgctgttaataggttcaatgaatgtattatagtcatttacttcaaaaccaaacaacatataatatttttgtaaaaatgtaatttctttaggtgacggtacactaattttcatcgttaaaccgttaatgctatttgcaatttggaatgcgtttcccatttctgattctgtcacagatggtggttgtaaggctaaatctttatattctgcctgttgttgtttgtagaaattatattcttcattaaacttaccaaataaagcggttggacttaaattacttgctacacttacagcgtcataaaaacgtgattttgggtcactaccatttaatacattatctatacgacttgtgattaattgactttctgcattacgctgtctattggcttgttgtgattgtcctaaaattccgttattaattaatataggcacttgcgcaaaactattaaatgttatattggtatttaagaatgaacctgtatcaattaatatatctttatttttagcaagtatcggtctatcgttttcagcactgttataatcaactggatatactcgcacttcattatgataaccaatgatggattttgtacgtaacttaacacctgttttttgtgaaattttaccagcgtcaagtaacattgtgttaccgttccagtcataaaattcaatcgtcatgtactcattacgtatcatatgtttaaactcgtcttttttagacaacatcatctcttgaagctttgtgaaacttaatgataaatcgtttaaactccattcttttgattttccaccctgttttaatgtctttaatccagtaattttttcacttgtcttaacgtcctctaaatcttttgtattaataaaatctttaggtaacatttgaaccttttgaaagttttgtgtaatccatggatatgcactcattttatccataaagttaataaagtcaccatattccataacgtataagttgactggcgatgtgatattgtcatatatcgtacctttagacgtatctaagtttggctcttttttcgtaccaaatttctttgataaatcagcgcttgactggaataacactaaattttccaaatactgttgcatttggttatacacatagtttttatttgatacttttaacacatcatcattgttacgtaacatcggcaacatatagttatacgtacgctttgataagtgttgacgttcaatattaacgtttgaaagttgttctaatacattaccttgtgtatacgtcataatagtatcaatcacaaaatatatttttaccacaacatcattcacatattcgatttgattcacaaaagcgtaatagcgtctatcctcaaaatctgataaaaacgtcatgtagttaatcccttgtgcgtcatgccactgcatatcaacattgatttccattctatcacgtataaaattatacggttgtttggaatagtctaatgatttaaaatgacgaccgtttaaaaaataatcatcacgctctttattactattaaaatgaattgtattttgatagtctgtaaacggtgtgttatagaaaaatttaaaatttgttaattttctcatttttacctccataaaaaatagtcgtataaataatttatacgactattataacatttttattcaatgatttgtgtatctattgcaaaacgtttatctccatttgttaagtcactatcgctataatttgatgtaacaaaatgtaattcattattaaagtttaaatataatcttgtattcatcattttattatcaatcgcacattgtgtgtagtgatgtgttgattttaagtttgcgttaatcgtacctaatttaatatcaccgtttttcttaatcccttttaataccccttttaattgtatggttttaacaccattaattgttacaatacgatattgcggtgcgggataacccccgttgctatcacttgcaacaataccactttcaagttgcacatcttgccaacctgtatcattaaattgtaattttgcactgttaattttttgatcaaaattttgttcaatttctgatttagattgtgcaattttagtatctatatttaagttatccacttttgttgataaaacgcttatacttgattcgtttgttgatgttttttgttttaaatcactaatatcattatcatattttgataaatcaatatgaccgtttccgtcaacaactggtctgtcttttaattcttgaataactttttcaatttttgatattttatcattatttgtttttaaagtagcgatgtcagatttaattgaattaatatcctgtgtataatctttttggttaatactgtttaattttgtttctaactcttttatcttatcaaggttggtatttgctttgatgtcattaatggtttgttctaaactttcaagtttcccagaacttgaattttgttttaacttattaatatcctcttgtatttcttgaattgtgttgtcattgttttgtttagattttaataattcaatttgactttctatgtcttttattttatcaagattaacactttttttaacttcagctaattctctttttaatgcgtcaatgttttctgcaccagtatttgatttaattatattaatttcatttgtgtttcgtcctacactatctttagtagcgtttaaagattgtgtaagtgtttcatatttatcatcatactttaacattgatttttcaaattcatttaattgtgtttgatgttgttctaaactttcatttaatatgacatttttttcttttaatgaatcaatgtcttttttattactatcaatcattggttggaatttttttattttctctagaaatgttgatattttttctttgttatcattaattgcaatatcatgatgttctatttgaccactgtatttattaatcaatgtttttaaatcattataaaatgttaatttataataaccagtatcagtacggacataaatatgtccgtctgatgtactgattaagtcattttcttctgttaaaaaatctgctaacctgtctattgtttcaacttgtcttaaacttcttacgattctatcagccattgttcacacctcttatttgtatcgtttccaactaaactcaaagaaaaaacctaaaatacccattatgagaaaaccccccaaggaataccaacactataactattacccgttttaccgttccattttcttactggtaaataataacgtgtaccttgccagttgtaaccaatccatacatacccatctgataaacaaacttcgtcatatggtgtataaccatttggttggaaccaatatccattaggttcacttaatttaggactacctacacgtgcaaatattggtaaaaatccacatgtaaatgttgcattttcatttctgtaatatgtgccatattggttttgtttccattttccgaatgtgtttacttttgatgtttctaattcgttgctgttactagcagaaaatttaggtctaataaagtgtgttacaccgtcataataatgtgttcttattgttgctttttcccaaccgtcaaacccaccacctaaccagttttgctctaaacatgtataataatctaaattaccacttaacacacattgaatatgtccatattgtccatctgtatatacaccaacatcccctaattgtggtttaaagttcggtgtattttcatacaccattgctaaacctttaaagtcattattgattgcgtctttagcgttaccccacatacgaactttaccgtctgtaatgtaatatatataagcaacagctaagtcagcgcattgataaccaaatgctaaatcaaagtccacacctacaccctcatgcttatatatccattcttttgcttgttgttgtgatttcatgaaacattatcctttcttaacccaactatattgacgtttttttgtatctgcattaacgttactaaagaattctttatgttcggacacattagcctctaatgtttgtcttacttcaccgacagcgttaccacttgaaacacgtaaccatgcacccacttttttaatttcttctggtgcgtctctaaacaattccatttggttaccagtaatataatattcaccaggtgtcgtaacgtaagctatccagttattgtattgacttgcttctaaatactcttgatatggtgcgtctgttttgattgttgtccataaaccataatcccattttaatgtaaatacatcgagcgtcataccacgcatgattttaaccatttttcgaccagtagaaaaacgcgttaattcttgtactgtacctaatgtttgtgttgtagggtatacattgatgaaacaaccagcgtctataatttttttactaccattcattggcatatttttaagtttactagctgtaccaccgtcaatataatagaaccctgcttgtgttaagtcatttaagtcgtcaatatggtctggaattgataacgcacgtccatcgtcttttgttaatttatagttttgtgaacctctcgcacgtaatgcttcaaagtgttcatactcaccaagttgaaagaacccatataaattattgaatcgttttccaccaccgccattagtcatagcaagtaataacgatttacgttttgtttttggattggtataaatacaaataccctccggctctttaaagttatcacgtggaaaattaataccgtcttgatatgataatttaaacggataatcataaatcttttgaccagttgttaatgaatatttaccaatttgaacgtgtgaattaactgaactgttaccacttaaccagtataaatcatcaccatcaacggcaatcccttgcatccatcgattatcattgttttctgaattatcaatcgtcatttctttttctacattatcaatgtgattttttacgtcagctcttgaacgtacctgtattgtcccgtcaccgaatcttaaaacgattttgtcattttcttcatcaattaacggtgtaaacgtgtgtttgtttaaaagtgactgtggtgtataatctgttaaccctttagcctcttctaaatctaaaatataattatctttatatgcgacttgtaacagttttgctacaccgtcatgatgtaaccatattttcatttcaccgttagattgtctttctaaacctattgtagtaccgtgaccaccttgtacaatacgcatactagaaattaagtcaccgctaggcgttaatttattaatccaaaaaccttctgggttttgtgaatctgattgtgtagagtacatttgattcgtttctttatctatgtttatagattggttaacagcattacgaataccaccgaatcccataacaaactttggttcaagctcatttaattcaaaaccattaacaaaacggtcaatgtctttaattaagtctttaacttctgatttaaaatcattcatttgtttcatttctgcaactttaaataatgcaaatgcagatgtaagaccagtactatatttagtaaattcatcatgaataattttatctattgtaccgtcgtttaaccaacctctaaataagtctttcgcttggtctgggaatgctttcattaagtcgtcccaatttttgaaacgtttttttaattcattgtcatagtcccaaatacgacgtgctaatacttcaattagttttgataatcttgaaatataatcataatatgattttgaattggtattataatctgctctatcatcgtaaaacggtgtgtaacgttctctcgttttatatatttcgtctaaaaatggacgaatgtcgtcaaaatatttaaaatcgttttcattatatgccataattttccacctttaccaaatttgtaaaaaacattttttatcaaattcatttaaaattttctttcttaaatcgtatactttatcaatattatcaattaaatactgttttgaaaattgtgtacctttcgcattacctttttgattttgattacgttttgcgttttgattactttcgttacttgatttattcacagttttaccgttgtcaattgtattattatctgcaaatcgtaacgttgtgttatctacatcaatgttaacctcgctttgtggtaatgacgcataagcatttctgttcgctgtcatgccagttgaattgtctaaagatgttgcattttgatttgaggtttcatctgtattgtttgttgtatcttcattatgttctgtaaaaccttgtgattgtagatatttttcaacttcgcttgatgaataaaccacattcaaataatcctcatgtgtgatacatacagtaatcacttgcatgccaaaagcttcaactgtttgtctgttgatttctctatctaaaaagtgtattgtaaatgattttttaaaaagtaagtcagataagtcatctttaagtttaaaacctttaaacactttttcattaacgatggctaaaacgtctttgtcaaacttcaacattttttgcatgaattgaaattcatcatcataaaacgttaatttatcattatttacaaattcattaaaaccttttttaattaattctgatttaataaaatcaaataaagtcattgtatatctagccattgtattcactactttcatcattagacaatgtatctatcattgtgatttctgaagtaacttcatcgtcgtaatacggtttaatatctaaaccataacgttttgataagaatgtaatcggttcacgaccttttaaataaatattactatttgatgtggtaaaacctcggttgctttttgcctcttcgtccgaaacaccgctttccttatccactgctagtgagttaatacctaaatagttacttaattcactaattttattttggtattcgcgtttcatctcagttagtgctggaatcacactattactggttaaatctatgatatcatcatcggcgttaaacataggtgacattttaacaaatggtgcaccgttgtatatttccgatacaagttgattaactgactcatcattaatgtctgatttaaatattttgctaaattttgcttgcataattaatgagaatctagataaaacaacctcagataattcatcagtataatgttctataatttctatatcactattatattgaattggtttattttgcatgacaacaaagttaccactcatacagttatcatatattttatgaatctgtaagcattcatctggtattaaatagtctggaacaatgaaataaatatcatcttttgttaatcgtttttgaaattgaaagttaaagtttgatgaaaaatttggtgcttgattaaagtaagtattatttacgtaaccaagaatcataatttgttcatttcttgctttgccgaccactacattgatgttttgtcttaatgctgattctaattgaataaaatctataccaaccgtatcacgattggtatagttgatgagtagtggtaaaaattccaaataacgattaaacataagacgtttaaatctgttgcgatgttctacaactcttttgttgatttcttttgataattcaacctgtacacctttattatgtttagtcatttatagcacctctattattctgttcttggtgttacatcttggtcagtaattaaaattttattaaagaatgggctaatggctttaaatgaatagtaatgaatccagtgtgtgacttcatcaaattcaccattatagaatggttgttttaacataccttttgtgtaacgtttatatttaattgaattaatatccaaaataaacgcgtataaatctgattttggtttaatttcttcaacattatctttaaactctgatagttttgacacatcataagtgaatactgaaccaactggaattgtatcacctttatgagtttgataatcaccgtaagcacgtaagaaagctactgattcatcacttgatacgacaatatctttagtgactttgaaaacaccacctaggtcgtcaaaactgataacgtggtctgtaaagtcaatccctgctacttggaatgtgttcgcaatctttgtatctaaaagataagattttaagctatcagtcgttaaaataacaatatcttttaattttgaaactgttgtatattgtccgattgcaccacctgaagcacgatgaacttcattatatttagcgctgttgttttgtaagttaagaatagcttcaaaaactttacttgctaaatcttcttttgatgttgctttacgtacatttgattcagataattgattcaatgagtaatcaactaacattgcacgcatttctttttcttctaatacgttaatatcagaaattttctttttatagacacctaatgcataattagtagcgtctgctaatgtttggaaattgaaacgtgtgtcattgttatttaatgtaaatttttgtttcttcacaataccactaccatataacttagtagccatacgtggatagttacgtttcaacattagttcttcatttttagataagtccatgttaataggtactgtatccataattacatattcttcactgtattgacctataaagtcctgctctttagctaaccaattaaaacggttacctaatgcaatatcgattaataacgtttcattaatcttagggaataaaaatttatttacaaatgtttcaaacattgtattagaattatcccacttatcgccaaacgtccatgattttgaataagtatgattaaagtcttgtaatgcagatttagctgactttgcaactaatagtgctgtttcgttttttgtactcttttctgccatgatttattattcctcctcaacatcgccagtaaatgactgttttgaaagtgaatgaatttgtacaccataactatcttcacttttatttgtatcaattgacatattttcatttaattctgttcgtttatttaatcttgaatcttcatatgatgtacccatcatagaacgcatgttgttaccctcgtacatgtttaagttcctcctaatctaaatctaatttatcgacaagttcttcatctgaatagtctttatcattgttatctgtttcttttgattctggttgtggttgtggttgtggttgtggttgttgcatttgtgatgtttcaaaattagtaaatcgttgttctaatgaagcgatacgttgttctaaaacaactgggtctaattttgcacaatcttcatctgttgtagtaggttctaatttgttttcattttcttcttcgattgtttctactgttttatcttcagttgattcttcagttgattcttcagttgattctgaagtttcttcagttgattctgaagtttcttctttgtcgtctggttttacgatttcatcaaattctgtcattttgacacctccaaatattttataactaattatatcatagaatatttaaataagtaaattaaatttattttattttcaaatcataactttgaataaaagtcaatagatacataaattttgtatttaatgaatatgtaataggttagataagttggaaaagtagacgcacagtttttataagtttagtaaagaaatgatatgttaatttataagttttgatttgtataatcgtttattttaaacggtggggaggtgtaaatttacaat

SEQ ID NO: 116 - DNA, 17858 bp, Rosenblumvirus sp.
  source 1..17858: mol_type = genomic DNA
ttgctatactatgtatgtaatcaaatcaaggaggtaacaaaatggaaaatgtacaacctttacaaacttacattttaaaaaatggtaatatagttattgttatgggtaatacatcaacttatgaattaacattatttgtacttgaaaaggacgattttgaacaattagaccataattcacctaaaaaaatcgttgatgaattaaggaatgaaatcaatgatttaaggagtgataataatggttaatgttgataatgcacctgcagaaaaaggtcaagcatatactgaaatgttgcaactattcaataaacttattcaatggaatccagcttatactttcgacaatgcaattaacttagtatcggcttgccaacaactattattaaactataatagttctgttgttcaattcttaaatgatgaactaaacaacgaaactaaaccagaatctattttatcttacattgctggtgatgacccaatagaacaatggaatatgcacaaaggattttatgaaacgtataacgtttacgttttttagaaaggagtgatataataatgaaacctgatgatattgttacattacgaattaaaggttatattcttcactatttagatgataaaaatgaatatgttgaagaatttattccacttcatgagtatcatttatcaaaaacacaagcaaaagatttattacctaattcacacaaacttttatccactacacgcacaacgaaaacaattcaagtttattacaatgatttactacaaatttcaattccagaaagcaaataatttaaataagaggagaaataaaaatgacaaacgtaaaagatattttatcaagacaccaaaacacattagcgagatttgaatttgaggaaaaagaaagagaatttattaaactatcagaattagtagaaaaatacggtatgaaaaaagagtatatcgttagagcattattcacaaacaaagaatcaaaattcggtgaacaaggtgttatcgtcactgacgactataacgtaaacttaccgaatcacttaactgaattaattaaagacatgcgtcaagacgaggacgttgttaacattatcaatgctggtgaagtgcaatttacaatttatgaatatgaaaacaaaaaaggtcaaaaaggttactcaatcaactttggtccagtatcattttaatacaattttataggggatatttatcccctatttttatgaggtgctaaacaatggaaaaaatatacactgccgtattattatacaatgtatcaattaatgaaacatatgaacatgaaattgaacaattcgaaaaaataaataaagttaaggtaatatatagttattttgacgcaaacttttacaaaaaaggtgcatataatctttgtgtaaaatacattaaggagatataaaatgaatattacaacaatattaaacacaaaaaaattaattaattatattttagataatagagattgttttatgaataaaataacaaaatttgaatcactaagtggaaaatgtgttgtttttgttagatacggtgaaatttctattgaatactatgatagtgatacaaaatacaatgatttatttactttagacattgacgttgatgttcgtacatatagttttagttgtcttgaggttttttatcgagaacatttaaacccattatataaaaaagaagtttttatggattgtactattgatgacgtattagaatatttcgagaaaccaatagaaagtaatataacaataatttttcaaaacaaagtgatatataataacgggaacgtgatagaacatgactaatatattaaacatagctattattttccttttagcatttttaattacacttgtaatacttatgacaatgcatatacgtgtgtcatttggtgttttatttactacattgattatattctacattatctttttagtggttatatatgggttatatggaggtcgttagcaatggttagacatacgtccgaaatggataaatggaaaaaagaaagagacgcaagaaaagagcaggaaaaagaattgtttttaaatgattttagtactgttaattttaaatttgatgataaagatttacaagaggcgtacatagacacatggaaacatttcgcacatttgccctattttccaaaagaaagaaacgtgtcatatgcaaatgccgtatcattggtaagaggtaaaagacatgaacaattaaactatatacttgaaatatataaccgtaaagatgaatctaataataaaaacgctaaaaaacataaatatgctttatatgaattacaagctaaaaataataattcttctatgtataaatatattaaagaaattgacactttatacaaagaaattggtaaatcagacagaccagtgactactattgatgataaagatgtgaggtataactttttatattatgcaacatttgaagagtaattttaatactgtaaacgacatcataaactattataaggagcaaaaacatggtgaaacaaaatcgtttagacatggtaagagattatcaaaatgctgtcaatcatgtcagaaaaaaaataccagataactataatcaaatagaattagttgatgaactcatgaatgatgatatagactattacatatctatttcaaaccgttctgacggaaaatcgttcaactatgtttcattctttatttatttagctataaaacttgatattaaatttactttattatcacgtcattatacattacgtgacgcttatcgtgattttattgaggaaatcatagacaaaaacccactattcaaatctaagcgtgtcacattcagaagcgctagggactatttagctatcatctatcaagataaggaaatcggtgtgattacagatttgaatagtgcaactgatttaaaatatcattctaactttttaaaacactaccctatcattatatatgatgaatttttagcacttgaagatgactatttaattgacgagtgggataagttaaaaacaatttatgaatcaatcgaccgtaaccatggtaatgttgattatattggctttcctaaaatgtttttactaggtaatgcagtcaacttttcaagtcctatattatccaatttaaatatatataacttattacaaaaacataaaatgaacacatcacgactttacaaaaacatttttttagaaatgcgaagaaacgattacgtaaatgaaaagcgtaacacacgggcattcaattcaaacgatgacgctatgactactggcgagtttgaatttaacgaatataatttggcagatgataatttaagaaatcatatcaatcaaaacggtgattttttctatattaaaactgacgataaatatataaaaattatgtataatgttgatacatttaatgctaatattattgttataccttatacaaaacaatatgaattttgtactaaaatcaaagatatagatgacaatgttatttatttaagagaagatatgttttataaagaaaacatggagcgttattattacaatccaagcaatttacattttgataacgcttactcaaaaaattacgttgttgataatgatagatatttatatttagatatgaataaaattataaaatttcatataaaaaatgaaatgaagaaaaatatgagtgaatttgaaagaaaagaaaaaatatatgaagataactatattgaaaatacaaagaagtatttaatgaaacaatacggcttataaaaggtgtgtaagattatgggattactagaatgcatgcaatatcataaacatgaacgtcgaatgattttatactgggatatagaaacattagcgtacaataaagttaacggacgaaaaaaaccaaccaaatataaaaacgtaacgtattcagtagcaattggttggtttaatggttatgagattgatgtagaagtatttcctagttttgaatcgttttatgacgcattttatacgtatgtgaaacgacgtgatacaatcactaagtcaaaaacagatattatcatgattgcacataactgtaataagtatgacaaccattttttacttaaagataccatgcgttattttgataatatcacacgtgaaaatatatatttaaaatctgcagaagaaaacgaacacacactaaagatgcaagaggctactattttagctaaaaatcaaaatgtgattttagaaaaacgtgtgaaatcgtctattaatttagacttaacaatgtttttaaatggatttaaatttaatattattgataactttatgaaaacaaatacatcaattgcaacattaggtaaaaagttgcttgacggtggttatttaacagacgaccaacttaaaacagattttaattacacgatatttgataaagataacgacatgtcagatagtgaagcctatgactatgccgtaaagtgttttgctaaactcacacctgaacaacttacatacattcataatgacgttattatattaggtatgtgccatattcattatagtgatatatttccaaattttgactataacaaattaacattttcattgaatattatggaatcgtatttaaataatcaaatgacgcgttttcagttactcaatcaatatcaagatattaaaatatcatatacacattatcatttccatgatatgaatttttatgattatatcaaatcattttatcgtggtggtttaaatatgtataacactaaatacataaacaaacttattgatgagccttgtttttctattgatatcaattccagttatccttatgtgatgtatcatgagaaaattccgacatggttatacttttatgaacattattcagaacctacattaatccctacttttttagatgatgacaattatttttcattatataagattgataaagatgtatttaacaatgatttattaattaaaatcaaatcacgtgtattacgtcaaatgattgtaaaatactataataatgataatgattacgttaatattaatacaaatacattaagaatgattcaagacattacgggtattgattgcacgcatatacgtgttaattcgtttgtgatatatgaatgtgaatactttcatgcacgtgatattatatttcaaaactattttattaaaacacaaggtaagttaaaaaacaaaatcaacatgacatcaccttacgactatcatattactgatgacatcaacgaacacccttactcaaatgaggaggttatgttgtctaaagttgtacttaacggattatatggcatacctgcattacgttcacattttaacttattccgtttagatgataacaacgaactatataatatcattaacggttacaaaaacactgaacgtaatatattattctctacatttgtcacatcacgttcattatataacttattggtacctttccaatacttaactgaaaatgaaattgacgacaattttatttattgcgatactgatagtttgtatatgaaatccgttgttaaacccttattgaaccccagtttattcgacccgatagccttaggtaaatgggatattgaaaacgaacagatagataagatgtttgtactgaatcataaaaaatatgcatatgaagtgaatggaaagattaaaattgcttctgctggtataccgaaaagcgcctttgatacaagcgtcgattttgaaacctttgtacgtgaacaattctttgacggtgtgataatagaaaacaataaaagtatctataacgaacagggtacgatatcgatttatccgtctaaaacagaaattgtatgcggtaatgtatatgatgaatattttactgatgaacttaatatgaaacgtgaatttatcttaaaagacgctagagaaaattttgaccatagtcaatttgatgatattctttatattgaaagtgacatcggttcattctcacttaatgacttatttccagttgtacgttcagtgcataataaatctaatttgcatatattaaaacgtgaacacgatgaattaaaaaaaggcaactgttaaataacagtcgcctttttcttttgatataacatgaaaaatgtgtacgaaaattgattatgttttgtattttatttactagcattactagcatgttttcattatagcatagttaattaagcaataccactgaagaatacaatattatcaccagcgttatgaggtacaccattaatcaatgtatataatacaacccgtgacggtgccacgtatggtgggacgttatagtttgctactaagaatgaaccatcgtcaaatactgctacaacgacacctgtgtgaccaatgccatatgctgttgcttgtaagtatggtggtttacttgaaaaaccataccctactgttggattatgtgttgtttttgcacctaactttttatatacgtaccacacacgttgaccgtttgttatttgaccgtcgtctgttggttgtcttttaccatgtaattgtgacatatatgcccatgttaattctgtacattgtcctgcattacccgtttgaggaaatatgttacctggtttgtacaagtattcttttttgaataaaggtacaccaattgcttttttatatttttctggtaactgtgcatacgtccagttaccaccaatgacgcgtccacttttaccatttggtttgactgacttaccactaattggtttatggtccccgtcatcatcagtagggtttgaactactatccccactatctacttgcacactatcaatcagtttttttaatgaatcaagtagcccaatcgtcattttaatatgatatgtgttgttaaatgttttttgtaatgtaaaataatcattactaaaaaatttatcactaccaatactgtgtacatcccattgtaatgcgtcttgtactttttttaataattcttgcatggcttgttttgctaaagcgagcagtgaactaccactgtcaccactactaccactgtcagacgaatcactaggtgaaccacctttaccgtctaatttaccaccccatgctaaaatagtatttgcaccgtctaaaaaaggattaccatagttttgtactttattatatgacgctttcaaacctaggggataatatgccgcccaagtagccgctgctgttaatggaatatacgcacgtccgattgtacctgctttcatatttttagcaaaatctgcattaccttttctttgtacgtcttgaggtacaaagtgaacgatgttacctgcgtcataccaagacggttgtcctgcttgttttgattgtgatactaattttcttgcaatgaatttagcgtctgttaaatagtcacctcgtgcagatgtatggttcaaccaacctaaaccagcgctatacccttcatttttttcatatacagcaaaaagagtaggtgacacacctatctcttttactgcttttaatacttgtctgattttactttcattaccacctagccatacattaaagcgtccatacccttttactttagggactaactggtctatcgttaaaccgaaatcatcattaatatacgaatgcgtaaatttatctatcttctcttggtcgttcattattatcacccttttcagaatcgtttttaattactcttaatttatctttaatttgttcaggcactaatacgtccatttcagcacaattttcaacaatagatagtccctcatttgcgatataatagaaaatcgtaatcatgagtaaaccaccttttaattgtaaaatctggtcaatgatgttagctaaaatgataatacagaatatcaataattttttagcaaaacctttcattgattttttagaccatagattattatttttaattgctttagcaaaaccagtaacaacatctataatcatcaaaacaaataaaaaatatagtaactttaaatcacctgcatatatgaacatatgaaatgcttctgtgtccgtaaatcttaattttacctcattcattttatacaccttctctaaatttattatttaacgggttctgtaacattggattacctgaaccgtcattatgccaaaatctcacaccagattctaaaattgcttttaattgttccattaacatagggtcaatgtcacgtatggtatacgtacctgtacattttaaatagttgcatacagtcatgctgttaataggttcaatgaatgtattatagtcatttacttcaaaaccaaacaacatataatatttttgtaaaaatgtaatttctttaggtgacggtacactaattttcatcgttaaaccgttaatgctatttgcaatttggaatgcgtttcccatttctgattctgtcacagatggtggttgtaaggctaaatctttatattctgcctgttgttgtttgtagaaattatattcttcattaaacttaccaaataaagcggttggacttaaattacttgctacacttacagcgtcataaaaacgtgattttgggtcactaccatttaatacattatctatacgacttgtgattaattgactttctgcattacgctgtctattggcttgttgtgattgtcctaaaattccgttattaattaatataggcacttgcgcaaaactattaaatgttatattggtatttaagaatgaacctgtatcaattaatatatctttatttttagcaagtatcggtctatcgttttcagcactgttataatcaactggatatactcgcacttcattatgataaccaatgatggattttgtacgtaacttaacacctgttttttgtgaaattttaccagcgtcaagtaacattgtgttaccgttccagtcataaaattcaatcgtcatgtactcattacgtatcatatgtttaaactcgtcttttttagacaacatcatctcttgaagctttgtgaaacttaatgataaatcgtttaaactccattcttttgattttccaccctgttttaatgtctttaatccagtaattttttcacttgtcttaacgtcctctaaatcttttgtattaataaaatctttaggtaacatttgaaccttttgaaagttttgtgtaatccatggatatgcactcattttatccataaagttaataaagtcaccatattccataacgtataagttgactggcgatgtgatattgtcatatatcgtacctttagacgtatctaagtttggctcttttttcgtaccaaatttctttgataaatcagcgcttgactggaataacactaaattttccaaatactgttgcatttggttatacacatagtttttatttgatacttttaacacatcatcattgttacgtaacatcggcaacatatagttatacgtacgctttgataagtgttgacgttcaatattaacgtttgaaagttgttctaatacattaccttgtgtatacgtcataatagtatcaatcacaaaatatatttttaccacaacatcattcacatattcgatttgattcacaaaagcgtaatagcgtctatcctcaaaatctgataaaaacgtcatgtagttaatcccttgtgcgtcatgccactgcatatcaacattgatttccattctatcacgtataaaattatacggttgtttggaatagtctaatgatttaaaatgacgaccgtttaaaaaataatcatcacgctctttattactattaaaatgaattgtattttgatagtctgtaaacggtgtgttatagaaaaatttaaaatttgttaattttctcatttttacctccataaaaaatagtcgtataaataatttatacgactattataacatttttattcaatgatttgtgtatctattgcaaaacgtttatctccatttgttaagtcactatcgctataatttgatgtaacaaaatgtaattcattattaaagtttaaatataatcttgtattcatcattttattatcaatcgcacattgtgtgtagtgatgtgttgattttaagtttgcgttaatcgtacctaatttaatatcaccgtttttcttaatcccttttaataccccttttaattgtatggttttaacaccattaattgttacaatacgatattgcggtgcgggataacccccgttgctatcacttgcaacaataccactttcaagttgcacatcttgccaacctgtatcattaaattgtaattttgcactgttaattttttgatcaaaattttgttcaatttctgatttagattgtgcaattttagtatctatatttaagttatccacttttgttgataaaacgcttatacttgattcgtttgttgatgttttttgttttaaatcactaatatcattatcatattttgataaatcaatatgaccgtttccgtcaacaactggtctgtcttttaattcttgaataactttttcaatttttgatattttatcattatttgtttttaaagtagcgatgtcagatttaattgaattaatatcctgtgtataatctttttggttaatactgtttaattttgtttctaactcttttatcttatcaaggttggtatttgctttgatgtcattaatggtttgttctaaactttcaagtttcccagaacttgaattttgttttaacttattaatatcctcttgtatttcttgaattgtgttgtcattgttttgtttagattttaataattcaatttgactttctatgtcttttattttatcaagattaacactttttttaacttcagctaattctctttttaatgcgtcaatgttttctgcaccagtatttgatttaattatattaatttcatttgtgtttcgtcctacactatctttagtagcgtttaaagattgtgtaagtgtttcatatttatcatcatactttaacattgatttttcaaattcatttaattgtgtttgatgttgttctaaactttcatttaatatgacatttttttcttttaatgaatcaatgtcttttttattactatcaatcattggttggaatttttttattttctctagaaatgttgatattttttctttgttatcattaattgcaatatcatgatgttctatttgaccactgtatttattaatcaatgtttttaaatcattataaaatgttaatttataataaccagtatcagtacggacataaatatgtccgtctgatgtactgattaagtcattttcttctgttaaaaaatctgctaacctgtctattgtttcaacttgtcttaaacttcttacgattctatcagccattgttcacacctcttatttgtatcgtttccaactaaactcaaagaaaaaacctaaaatacccattatgagaaaaccccccaaggaataccaacactataactattacccgttttaccgttccattttcttactggtaaataataacgtgtaccttgccagttgtaaccaatccatacatacccatctgataaacaaacttcgtcatatggtgtataaccatttggttggaaccaatatccattaggttcacttaatttaggactacctacacgtgcaaatattggtaaaaatccacatgtaaatgttgcattttcatttctgtaatatgtgccatattggttttgtttccattttccgaatgtgtttacttttgatgtttctaattcgttgctgttactagcagaaaatttaggtctaataaagtgtgttacaccgtcataataatgtgttcttattgttgctttttcccaaccgtcaaacccaccacctaaccagttttgctctaaacatgtataataatctaaattaccacttaacacacattgaatatgtccatattgtccatctgtatatacaccaacatcccctaattgtggtttaaagttcggtgtattttcatacaccattgctaaacctttaaagtcattattgattgcgtctttagcgttaccccacatacgaactttaccgtctgtaatgtaatatatataagcaacagctaagtcagcgcattgataaccaaatgctaaatcaaagtccacacctacaccctcatgcttatatatccattcttttgcttgttgttgtgatttcatgaaacattatcctttcttaacccaactatattgacgtttttttgtatctgcattaacgttactaaagaattctttatgttcggacacattagcctctaatgtttgtcttacttcaccgacagcgttaccacttgaaacacgtaaccatgcacccacttttttaatttcttctggtgcgtctctaaacaattccatttggttaccagtaatataatattcaccaggtgtcgtaacgtaagctatccagttattgtattgacttgcttctaaatactcttgatatggtgcgtctgttttgattgttgtccataaaccataatcccattttaatgtaaatacatcgagcgtcataccacgcatgattttaaccatttttcgaccagtagaaaaacgcgttaattcttgtactgtacctaatgtttgtgttgtagggtatacattgatgaaacaaccagcgtctataatttttttactaccattcattggcatatttttaagtttactagctgtaccaccgtcaatataatagaaccctgcttgtgttaagtcatttaagtcgtcaatatggtctggaattgataacgcacgtccatcgtcttttgttaatttatagttttgtgaacctctcgcacgtaatgcttcaaagtgttcatactcaccaagttgaaagaacccatataaattattgaatcgttttccaccaccgccattagtcatagcaagtaataacgatttacgttttgtttttggattggtataaatacaaataccctccggctctttaaagttatcacgtggaaaattaataccgtcttgatatgataatttaaacggataatcataaatcttttgaccagttgttaatgaatatttaccaatttgaacgtgtgaattaactgaactgttaccacttaaccagtataaatcatcaccatcaacggcaatcccttgcatccatcgattatcattgttttctgaattatcaatcgtcatttctttttctacattatcaatgtgattttttacgtcagctcttgaacgtacctgtattgtcccgtcaccgaatcttaaaacgattttgtcattttcttcatcaattaacggtgtaaacgtgtgtttgtttaaaagtgactgtggtgtataatctgttaaccctttagcctcttctaaatctaaaatataattatctttatatgcgacttgtaacagttttgctacaccgtcatgatgtaaccatattttcatttcaccgttagattgtctttctaaacctattgtagtaccgtgaccaccttgtacaatacgcatactagaaattaagtcaccgctaggcgttaatttattaatccaaaaaccttctgggttttgtgaatctgattgtgtagagtacatttgattcgtttctttatctatgtttatagattggttaacagcattacgaataccaccgaatcccataacaaactttggttcaagctcatttaattcaaaaccattaacaaaacggtcaatgtctttaattaagtctttaacttctgatttaaaatcattcatttgtttcatttctgcaactttaaataatgcaaatgcagatgtaagaccagtactatatttagtaaattcatcatgaataattttatctattgtaccgtcgtttaaccaacctctaaataagtctttcgcttggtctgggaatgctttcattaagtcgtcccaatttttgaaacgtttttttaattcattgtcatagtcccaaatacgacgtgctaatacttcaattagttttgataatcttgaaatataatcataatatgattttgaattggtattataatctgctctatcatcgtaaaacggtgtgtaacgttctctcgttttatatatttcgtctaaaaatggacgaatgtcgtcaaaatatttaaaatcgttttcattatatgccataattttccacctttaccaaatttgtaaaaaacattttttatcaaattcatttaaaattttctttcttaaatcgtatactttatcaatattatcaattaaatactgttttgaaaattgtgtacctttcgcattacctttttgattttgattacgttttgcgttttgattactttcgttacttgatttattcacagttttaccgttgtcaattgtattattatctgcaaatcgtaacgttgtgttatctacatcaatgttaacctcgctttgtggtaatgacgcataagcatttctgttcgctgtcatgccagttgaattgtctaaagatgttgcattttgatttgaggtttcatctgtattgtttgttgtatcttcattatgttctgtaaaaccttgtgattgtagatatttttcaacttcgcttgatgaataaaccacattcaaataatcctcatgtgtgatacatacagtaatcacttgcatgccaaaagcttcaactgtttgtctgttgatttctctatctaaaaagtgtattgtaaatgattttttaaaaagtaagtcagataagtcatctttaagtttaaaacctttaaacactttttcattaacgatggctaaaacgtctttgtcaaacttcaacattttttgcatgaattgaaattcatcatcataaaacgttaatttatcattatttacaaattcattaaaaccttttttaattaattctgatttaataaaatcaaataaagtcattgtatatctagccattgtattcactactttcatcattagacaatgtatctatcattgtgatttctgaagtaacttcatcgtcgtaatacggtttaatatctaaaccataacgttttgataagaatgtaatcggttcacgaccttttaaataaatattactatttgatgtggtaaaacctcggttgctttttgcctcttcgtccgaaacaccgctttccttatccactgctagtgagttaatacctaaatagttacttaattcactaattttattttggtattcgcgtttcatctcagttagtgctggaatcacactattactggttaaatctatgatatcatcatcggcgttaaacataggtgacattttaacaaatggtgcaccgttgtatatttccgatacaagttgattaactgactcatcattaatgtctgatttaaatattttgctaaattttgcttgcataattaatgagaatctagataaaacaacctcagataattcatcagtataatgttctataatttctatatcactattatattgaattggtttattttgcatgacaacaaagttaccactcatacagttatcatatattttatgaatctgtaagcattcatctggtattaaatagtctggaacaatgaaataaatatcatcttttgttaatcgtttttgaaattgaaagttaaagtttgatgaaaaatttggtgcttgattaaagtaagtattatttacgtaaccaagaatcataatttgttcatttcttgctttgccgaccactacattgatgttttgtcttaatgctgattctaattgaataaaatctataccaaccgtatcacgattggtatagttgatgagtagtggtaaaaattccaaataacgattaaacataagacgtttaaatctgttgcgatgttctacaactcttttgttgatttcttttgataattcaacctgtacacctttattatgtttagtcatttatagcacctctattattctgttcttggtgttacatcttggtcagtaattaaaattttattaaagaatgggctaatggctttaaatgaatagtaatgaatccagtgtgtgacttcatcaaattcaccattatagaatggttgttttaacataccttttgtgtaacgtttatatttaattgaattaatatccaaaataaacgcgtataaatctgattttggtttaatttcttcaacattatctttaaactctgatagttttgacacatcataagtgaatactgaaccaactggaattgtatcacctttatgagtttgataatcaccgtaagcacgtaagaaagctactgattcatcacttgatacgacaatatctttagtgactttgaaaacaccacctaggtcgtcaaaactgataacgtggtctgtaaagtcaatccctgctacttggaatgtgttcgcaatctttgtatctaaaagataagattttaagctatcagtcgttaaaataacaatatcttttaattttgaaactgttgtatattgtccgattgcaccacctgaagcacgatgaacttcattatatttagcgctgttgttttgtaagttaagaatagcttcaaaaactttacttgctaaatcttcttttgatgttgctttacgtacatttgattcagataattgattcaatgagtaatcaactaacattgcacgcatttctttttcttctaatacgttaatatcagaaattttctttttatagacacctaatgcataattagtagcgtctgctaatgtttggaaattgaaacgtgtgtcattgttatttaatgtaaatttttgtttcttcacaataccactaccatataacttagtagccatacgtggatagttacgtttcaacattagttcttcatttttagataagtccatgttaataggtactgtatccataattacatattcttcactgtattgacctataaagtcctgctctttagctaaccaattaaaacggttacctaatgcaatatcgattaataacgtttcattaatcttagggaataaaaatttatttacaaatgtttcaaacattgtattagaattatcccacttatcgccaaacgtccatgattttgaataagtatgattaaagtcttgtaatgcagatttagctgactttgcaactaatagtgctgtttcgttttttgtactcttttctgccatgatttattattcctcctcaacatcgccagtaaatgactgttttgaaagtgaatgaatttgtacaccataactatcttcacttttatttgtatcaattgacatattttcatttaattctgttcgtttatttaatcttgaatcttcatatgatgtacccatcatagaacgcatgttgttaccctcgtacatgtttaagttcctcctaatctaaatctaatttatcgacaagttcttcatctgaatagtctttatcattgttatctgtttcttttgattctggttgtggttgtggttgtggttgtggttgttgcatttgtgatgtttcaaaattagtaaatcgttgttctaatgaagcgatacgttgttctaaaacaactgggtctaattttgcacaatcttcatctgttgtagtaggttctaatttgttttcattttcttcttcgattgtttctactgttttatcttcagttgattcttcagttgattcttcagttgattctgaagtttcttcagttgattctgaagtttcttctttgtcgtctggttttacgatttcatcaaattctgtcattttgacacctccaaatattttataactaattatatcatagaatatttaaataagtaaattaaatttattttattttcaaatcataactttgaataaaagtcaatagatacataaattttgtatttaatgaatatgtaataggttagataagttggaaaagtagacgcacagtttttataagtttagtaaagaaatgatatgttaatttataagttttgatttgtataatcgtttattttaaacggtggggaggtgtaaatttacaataactttttccc

SEQ ID NO: 117 - DNA, 18133 bp, Rosenblumvirus sp.
  source 1..18133: mol_type = genomic DNA
gggaaaaagtttttgtaaaattacacctccccaccgtttaaaataaacgattatacaaatcaaaacttataaattaacttatcatttctttactaaacttataaaaactgtgcttctacttttccaacttatcaaacctataacatattcataaaatacaaaatatatgtatctattgacttttattcaaaattatgatttgtatttaaaatctaatttcttctattaaatagtatttttaaattatttaaactttttaagaaaaaccattgacaaaacttttaaacgtttgctatactatgtatgtaatcaaatcaaggaggtaacaaaatggaaaatgtacaacctttacaaacttacattttaaaaaatggtaatatagttattgttatgggtaatacatcaacttatgaattaacattatttgtacttgaaaaggacgattttgaacaattagaccataattcacctaaaaaaatcgttgatgaattaaggaatgaaatcaatgatttaaggagtgataataatggttaatgttgataatgcacctgcagaaaaaggtcaagcatatactgaaatgttgcaactattcaataaacttattcaatggaatccagcttatactttcgacaatgcaattaacttagtatcggcttgccaacaactattattaaactataatagttctgttgttcaattcttaaatgatgaactaaacaacgaaactaaaccagaatctattttatcttacattgctggtgatgacccaatagaacaatggaatatgcacaaaggattttatgaaacgtataacgtttacgttttttagaaaggagtgatataataatgaaacctgatgatattgttacattacgaattaaaggttatattcttcactatttagatgataaaaatgaatatgttgaagaatttattccacttcatgagtatcatttatcaaaaacacaagcaaaagatttattacctaattcacacaaacttttatccactacacgcacaacgaaaacaattcaagtttattacaatgatttactacaaatttcaattccagaaagcaaataatttaaataagaggagaaataaaaatgacaaacgtaaaagatattttatcaagacaccaaaacacattagcgagatttgaatttgaggaaaaagaaagagaatttattaaactatcagaattagtagaaaaatacggtatgaaaaaagagtatatcgttagagcattattcacaaacaaagaatcaaaattcggtgaacaaggtgttatcgtcactgacgactataacgtaaacttaccgaatcacttaactgaattaattaaagacatgcgtcaagacgaggacgttgttaacattatcaatgctggtgaagtgcaatttacaatttatgaatatgaaaacaaaaaaggtcaaaaaggttactcaatcaactttggtccagtatcattttaatacaattttataggggatatttatcccctatttttatgaggtgctaaacaatggaaaaaatatacactgccgtattattatacaatgtatcaattaatgaaacatatgaacatgaaattgaacaattcgaaaaaataaataaagttaaggtaatatatagttattttgacgcaaacttttacaaaaaaggtgcatataatctttgtgtaaaatacattaaggagatataaaatgaatattacaacaatattaaacacaaaaaaattaattaattatattttagataatagagattgttttatgaataaaataacaaaatttgaatcactaagtggaaaatgtgttgtttttgttagatacggtgaaatttctattgaatactatgatagtgatacaaaatacaatgatttatttactttagacattgacgttgatgttcgtacatatagttttagttgtcttgaggttttttatcgagaacatttaaacccattatataaaaaagaagtttttatggattgtactattgatgacgtattagaatatttcgagaaaccaatagaaagtaatataacaataatttttcaaaacaaagtgatatataataacgggaacgtgatagaacatgactaatatattaaacatagctattattttccttttagcatttttaattacacttgtaatacttatgacaatgcatatacgtgtgtcatttggtgttttatttactacattgattatattctacattatctttttagtggttatatatgggttatatggaggtcgttagcaatggttagacatacgtccgaaatggataaatggaaaaaagaaagagacgcaagaaaagagcaggaaaaagaattgtttttaaatgattttagtactgttaattttaaatttgatgataaagatttacaagaggcgtacatagacacatggaaacatttcgcacatttgccctattttccaaaagaaagaaacgtgtcatatgcaaatgccgtatcattggtaagaggtaaaagacatgaacaattaaactatatacttgaaatatataaccgtaaagatgaatctaataataaaaacgctaaaaaacataaatatgctttatatgaattacaagctaaaaataataattcttctatgtataaatatattaaagaaattgacactttatacaaagaaattggtaaatcagacagaccagtgactactattgatgataaagatgtgaggtataactttttatattatgcaacatttgaagagtaattttaatactgtaaacgacatcataaactattataaggagcaaaaacatggtgaaacaaaatcgtttagacatggtaagagattatcaaaatgctgtcaatcatgtcagaaaaaaaataccagataactataatcaaatagaattagttgatgaactcatgaatgatgatatagactattacatatctatttcaaaccgttctgacggaaaatcgttcaactatgtttcattctttatttatttagctataaaacttgatattaaatttactttattatcacgtcattatacattacgtgacgcttatcgtgattttattgaggaaatcatagacaaaaacccactattcaaatctaagcgtgtcacattcagaagcgctagggactatttagctatcatctatcaagataaggaaatcggtgtgattacagatttgaatagtgcaactgatttaaaatatcattctaactttttaaaacactaccctatcattatatatgatgaatttttagcacttgaagatgactatttaattgacgagtgggataagttaaaaacaatttatgaatcaatcgaccgtaaccatggtaatgttgattatattggctttcctaaaatgtttttactaggtaatgcagtcaacttttcaagtcctatattatccaatttaaatatatataacttattacaaaaacataaaatgaacacatcacgactttacaaaaacatttttttagaaatgcgaagaaacgattacgtaaatgaaaagcgtaacacacgggcattcaattcaaacgatgacgctatgactactggcgagtttgaatttaacgaatataatttggcagatgataatttaagaaatcatatcaatcaaaacggtgattttttctatattaaaactgacgataaatatataaaaattatgtataatgttgatacatttaatgctaatattattgttataccttatacaaaacaatatgaattttgtactaaaatcaaagatatagatgacaatgttatttatttaagagaagatatgttttataaagaaaacatggagcgttattattacaatccaagcaatttacattttgataacgcttactcaaaaaattacgttgttgataatgatagatatttatatttagatatgaataaaattataaaatttcatataaaaaatgaaatgaagaaaaatatgagtgaatttgaaagaaaagaaaaaatatatgaagataactatattgaaaatacaaagaagtatttaatgaaacaatacggcttataaaaggtgtgtaagattatgggattactagaatgcatgcaatatcataaacatgaacgtcgaatgattttatactgggatatagaaacattagcgtacaataaagttaacggacgaaaaaaaccaaccaaatataaaaacgtaacgtattcagtagcaattggttggtttaatggttatgagattgatgtagaagtatttcctagttttgaatcgttttatgacgcattttatacgtatgtgaaacgacgtgatacaatcactaagtcaaaaacagatattatcatgattgcacataactgtaataagtatgacaaccattttttacttaaagataccatgcgttattttgataatatcacacgtgaaaatatatatttaaaatctgcagaagaaaacgaacacacactaaagatgcaagaggctactattttagctaaaaatcaaaatgtgattttagaaaaacgtgtgaaatcgtctattaatttagacttaacaatgtttttaaatggatttaaatttaatattattgataactttatgaaaacaaatacatcaattgcaacattaggtaaaaagttgcttgacggtggttatttaacagacgaccaacttaaaacagattttaattacacgatatttgataaagataacgacatgtcagatagtgaagcctatgactatgccgtaaagtgttttgctaaactcacacctgaacaacttacatacattcataatgacgttattatattaggtatgtgccatattcattatagtgatatatttccaaattttgactataacaaattaacattttcattgaatattatggaatcgtatttaaataatcaaatgacgcgttttcagttactcaatcaatatcaagatattaaaatatcatatacacattatcatttccatgatatgaatttttatgattatatcaaatcattttatcgtggtggtttaaatatgtataacactaaatacataaacaaacttattgatgagccttgtttttctattgatatcaattccagttatccttatgtgatgtatcatgagaaaattccgacatggttatacttttatgaacattattcagaacctacattaatccctacttttttagatgatgacaattatttttcattatataagattgataaagatgtatttaacaatgatttattaattaaaatcaaatcacgtgtattacgtcaaatgattgtaaaatactataataatgataatgattacgttaatattaatacaaatacattaagaatgattcaagacattacgggtattgattgcacgcatatacgtgttaattcgtttgtgatatatgaatgtgaatactttcatgcacgtgatattatatttcaaaactattttattaaaacacaaggtaagttaaaaaacaaaatcaacatgacatcaccttacgactatcatattactgatgacatcaacgaacacccttactcaaatgaggaggttatgttgtctaaagttgtacttaacggattatatggcatacctgcattacgttcacattttaacttattccgtttagatgataacaacgaactatataatatcattaacggttacaaaaacactgaacgtaatatattattctctacatttgtcacatcacgttcattatataacttattggtacctttccaatacttaactgaaaatgaaattgacgacaattttatttattgcgatactgatagtttgtatatgaaatccgttgttaaacccttattgaaccccagtttattcgacccgatagccttaggtaaatgggatattgaaaacgaacagatagataagatgtttgtactgaatcataaaaaatatgcatatgaagtgaatggaaagattaaaattgcttctgctggtataccgaaaagcgcctttgatacaagcgtcgattttgaaacctttgtacgtgaacaattctttgacggtgtgataatagaaaacaataaaagtatctataacgaacagggtacgatatcgatttatccgtctaaaacagaaattgtatgcggtaatgtatatgatgaatattttactgatgaacttaatatgaaacgtgaatttatcttaaaagacgctagagaaaattttgaccatagtcaatttgatgatattctttatattgaaagtgacatcggttcattctcacttaatgacttatttccagttgtacgttcagtgcataataaatctaatttgcatatattaaaacgtgaacacgatgaattaaaaaaaggcaactgttaaataacagtcgcctttttcttttgatataacatgaaaaatgtgtacgaaaattgattatgttttgtattttatttactagcattactagcatgttttcattatagcatagttaattaagcaataccactgaagaatacaatattatcaccagcgttatgaggtacaccattaatcaatgtatataatacaacccgtgacggtgccacgtatggtgggacgttatagtttgctactaagaatgaaccatcgtcaaatactgctacaacgacacctgtgtgaccaatgccatatgctgttgcttgtaagtatggtggtttacttgaaaaaccataccctactgttggattatgtgttgtttttgcacctaactttttatatacgtaccacacacgttgaccgtttgttatttgaccgtcgtctgttggttgtcttttaccatgtaattgtgacatatatgcccatgttaattctgtacattgtcctgcattacccgtttgaggaaatatgttacctggtttgtacaagtattcttttttgaataaaggtacaccaattgcttttttatatttttctggtaactgtgcatacgtccagttaccaccaatgacgcgtccacttttaccatttggtttgactgacttaccactaattggtttatggtccccgtcatcatcagtagggtttgaactactatccccactatctacttgcacactatcaatcagtttttttaatgaatcaagtagcccaatcgtcattttaatatgatatgtgttgttaaatgttttttgtaatgtaaaataatcattactaaaaaatttatcactaccaatactgtgtacatcccattgtaatgcgtcttgtactttttttaataattcttgcatggcttgttttgctaaagcgagcagtgaactaccactgtcaccactactaccactgtcagacgaatcactaggtgaaccacctttaccgtctaatttaccaccccatgctaaaatagtatttgcaccgtctaaaaaaggattaccatagttttgtactttattatatgacgctttcaaacctaggggataatatgccgcccaagtagccgctgctgttaatggaatatacgcacgtccgattgtacctgctttcatatttttagcaaaatctgcattaccttttctttgtacgtcttgaggtacaaagtgaacgatgttacctgcgtcataccaagacggttgtcctgcttgttttgattgtgatactaattttcttgcaatgaatttagcgtctgttaaatagtcacctcgtgcagatgtatggttcaaccaacctaaaccagcgctatacccttcatttttttcatatacagcaaaaagagtaggtgacacacctatctcttttactgcttttaatacttgtctgattttactttcattaccacctagccatacattaaagcgtccatacccttttactttagggactaactggtctatcgttaaaccgaaatcatcattaatatacgaatgcgtaaatttatctatcttctcttggtcgttcattattatcacccttttcagaatcgtttttaattactcttaatttatctttaatttgttcaggcactaatacgtccatttcagcacaattttcaacaatagatagtccctcatttgcgatataatagaaaatcgtaatcatgagtaaaccaccttttaattgtaaaatctggtcaatgatgttagctaaaatgataatacagaatatcaataattttttagcaaaacctttcattgattttttagaccatagattattatttttaattgctttagcaaaaccagtaacaacatctataatcatcaaaacaaataaaaaatatagtaactttaaatcacctgcatatatgaacatatgaaatgcttctgtgtccgtaaatcttaattttacctcattcattttatacaccttctctaaatttattatttaacgggttctgtaacattggattacctgaaccgtcattatgccaaaatctcacaccagattctaaaattgcttttaattgttccattaacatagggtcaatgtcacgtatggtatacgtacctgtacattttaaatagttgcatacagtcatgctgttaataggttcaatgaatgtattatagtcatttacttcaaaaccaaacaacatataatatttttgtaaaaatgtaatttctttaggtgacggtacactaattttcatcgttaaaccgttaatgctatttgcaatttggaatgcgtttcccatttctgattctgtcacagatggtggttgtaaggctaaatctttatattctgcctgttgttgtttgtagaaattatattcttcattaaacttaccaaataaagcggttggacttaaattacttgctacacttacagcgtcataaaaacgtgattttgggtcactaccatttaatacattatctatacgacttgtgattaattgactttctgcattacgctgtctattggcttgttgtgattgtcctaaaattccgttattaattaatataggcacttgcgcaaaactattaaatgttatattggtatttaagaatgaacctgtatcaattaatatatctttatttttagcaagtatcggtctatcgttttcagcactgttataatcaactggatatactcgcacttcattatgataaccaatgatggattttgtacgtaacttaacacctgttttttgtgaaattttaccagcgtcaagtaacattgtgttaccgttccagtcataaaattcaatcgtcatgtactcattacgtatcatatgtttaaactcgtcttttttagacaacatcatctcttgaagctttgtgaaacttaatgataaatcgtttaaactccattcttttgattttccaccctgttttaatgtctttaatccagtaattttttcacttgtcttaacgtcctctaaatcttttgtattaataaaatctttaggtaacatttgaaccttttgaaagttttgtgtaatccatggatatgcactcattttatccataaagttaataaagtcaccatattccataacgtataagttgactggcgatgtgatattgtcatatatcgtacctttagacgtatctaagtttggctcttttttcgtaccaaatttctttgataaatcagcgcttgactggaataacactaaattttccaaatactgttgcatttggttatacacatagtttttatttgatacttttaacacatcatcattgttacgtaacatcggcaacatatagttatacgtacgctttgataagtgttgacgttcaatattaacgtttgaaagttgttctaatacattaccttgtgtatacgtcataatagtatcaatcacaaaatatatttttaccacaacatcattcacatattcgatttgattcacaaaagcgtaatagcgtctatcctcaaaatctgataaaaacgtcatgtagttaatcccttgtgcgtcatgccactgcatatcaacattgatttccattctatcacgtataaaattatacggttgtttggaatagtctaatgatttaaaatgacgaccgtttaaaaaataatcatcacgctctttattactattaaaatgaattgtattttgatagtctgtaaacggtgtgttatagaaaaatttaaaatttgttaattttctcatttttacctccataaaaaatagtcgtataaataatttatacgactattataacatttttattcaatgatttgtgtatctattgcaaaacgtttatctccatttgttaagtcactatcgctataatttgatgtaacaaaatgtaattcattattaaagtttaaatataatcttgtattcatcattttattatcaatcgcacattgtgtgtagtgatgtgttgattttaagtttgcgttaatcgtacctaatttaatatcaccgtttttcttaatcccttttaataccccttttaattgtatggttttaacaccattaattgttacaatacgatattgcggtgcgggataacccccgttgctatcacttgcaacaataccactttcaagttgcacatcttgccaacctgtatcattaaattgtaattttgcactgttaattttttgatcaaaattttgttcaatttctgatttagattgtgcaattttagtatctatatttaagttatccacttttgttgataaaacgcttatacttgattcgtttgttgatgttttttgttttaaatcactaatatcattatcatattttgataaatcaatatgaccgtttccgtcaacaactggtctgtcttttaattcttgaataactttttcaatttttgatattttatcattatttgtttttaaagtagcgatgtcagatttaattgaattaatatcctgtgtataatctttttggttaatactgtttaattttgtttctaactcttttatcttatcaaggttggtatttgctttgatgtcattaatggtttgttctaaactttcaagtttcccagaacttgaattttgttttaacttattaatatcctcttgtatttcttgaattgtgttgtcattgttttgtttagattttaataattcaatttgactttctatgtcttttattttatcaagattaacactttttttaacttcagctaattctctttttaatgcgtcaatgttttctgcaccagtatttgatttaattatattaatttcatttgtgtttcgtcctacactatctttagtagcgtttaaagattgtgtaagtgtttcatatttatcatcatactttaacattgatttttcaaattcatttaattgtgtttgatgttgttctaaactttcatttaatatgacatttttttcttttaatgaatcaatgtcttttttattactatcaatcattggttggaatttttttattttctctagaaatgttgatattttttctttgttatcattaattgcaatatcatgatgttctatttgaccactgtatttattaatcaatgtttttaaatcattataaaatgttaatttataataaccagtatcagtacggacataaatatgtccgtctgatgtactgattaagtcattttcttctgttaaaaaatctgctaacctgtctattgtttcaacttgtcttaaacttcttacgattctatcagccattgttcacacctcttatttgtatcgtttccaactaaactcaaagaaaaaacctaaaatacccattatgagaaaaccccccaaggaataccaacactataactattacccgttttaccgttccattttcttactggtaaataataacgtgtaccttgccagttgtaaccaatccatacatacccatctgataaacaaacttcgtcatatggtgtataaccatttggttggaaccaatatccattaggttcacttaatttaggactacctacacgtgcaaatattggtaaaaatccacatgtaaatgttgcattttcatttctgtaatatgtgccatattggttttgtttccattttccgaatgtgtttacttttgatgtttctaattcgttgctgttactagcagaaaatttaggtctaataaagtgtgttacaccgtcataataatgtgttcttattgttgctttttcccaaccgtcaaacccaccacctaaccagttttgctctaaacatgtataataatctaaattaccacttaacacacattgaatatgtccatattgtccatctgtatatacaccaacatcccctaattgtggtttaaagttcggtgtattttcatacaccattgctaaacctttaaagtcattattgattgcgtctttagcgttaccccacatacgaactttaccgtctgtaatgtaatatatataagcaacagctaagtcagcgcattgataaccaaatgctaaatcaaagtccacacctacaccctcatgcttatatatccattcttttgcttgttgttgtgatttcatgaaacattatcctttcttaacccaactatattgacgtttttttgtatctgcattaacgttactaaagaattctttatgttcggacacattagcctctaatgtttgtcttacttcaccgacagcgttaccacttgaaacacgtaaccatgcacccacttttttaatttcttctggtgcgtctctaaacaattccatttggttaccagtaatataatattcaccaggtgtcgtaacgtaagctatccagttattgtattgacttgcttctaaatactcttgatatggtgcgtctgttttgattgttgtccataaaccataatcccattttaatgtaaatacatcgagcgtcataccacgcatgattttaaccatttttcgaccagtagaaaaacgcgttaattcttgtactgtacctaatgtttgtgttgtagggtatacattgatgaaacaaccagcgtctataatttttttactaccattcattggcatatttttaagtttactagctgtaccaccgtcaatataatagaaccctgcttgtgttaagtcatttaagtcgtcaatatggtctggaattgataacgcacgtccatcgtcttttgttaatttatagttttgtgaacctctcgcacgtaatgcttcaaagtgttcatactcaccaagttgaaagaacccatataaattattgaatcgttttccaccaccgccattagtcatagcaagtaataacgatttacgttttgtttttggattggtataaatacaaataccctccggctctttaaagttatcacgtggaaaattaataccgtcttgatatgataatttaaacggataatcataaatcttttgaccagttgttaatgaatatttaccaatttgaacgtgtgaattaactgaactgttaccacttaaccagtataaatcatcaccatcaacggcaatcccttgcatccatcgattatcattgttttctgaattatcaatcgtcatttctttttctacattatcaatgtgattttttacgtcagctcttgaacgtacctgtattgtcccgtcaccgaatcttaaaacgattttgtcattttcttcatcaattaacggtgtaaacgtgtgtttgtttaaaagtgactgtggtgtataatctgttaaccctttagcctcttctaaatctaaaatataattatctttatatgcgacttgtaacagttttgctacaccgtcatgatgtaaccatattttcatttcaccgttagattgtctttctaaacctattgtagtaccgtgaccaccttgtacaatacgcatactagaaattaagtcaccgctaggcgttaatttattaatccaaaaaccttctgggttttgtgaatctgattgtgtagagtacatttgattcgtttctttatctatgtttatagattggttaacagcattacgaataccaccgaatcccataacaaactttggttcaagctcatttaattcaaaaccattaacaaaacggtcaatgtctttaattaagtctttaacttctgatttaaaatcattcatttgtttcatttctgcaactttaaataatgcaaatgcagatgtaagaccagtactatatttagtaaattcatcatgaataattttatctattgtaccgtcgtttaaccaacctctaaataagtctttcgcttggtctgggaatgctttcattaagtcgtcccaatttttgaaacgtttttttaattcattgtcatagtcccaaatacgacgtgctaatacttcaattagttttgataatcttgaaatataatcataatatgattttgaattggtattataatctgctctatcatcgtaaaacggtgtgtaacgttctctcgttttatatatttcgtctaaaaatggacgaatgtcgtcaaaatatttaaaatcgttttcattatatgccataattttccacctttaccaaatttgtaaaaaacattttttatcaaattcatttaaaattttctttcttaaatcgtatactttatcaatattatcaattaaatactgttttgaaaattgtgtacctttcgcattacctttttgattttgattacgttttgcgttttgattactttcgttacttgatttattcacagttttaccgttgtcaattgtattattatctgcaaatcgtaacgttgtgttatctacatcaatgttaacctcgctttgtggtaatgacgcataagcatttctgttcgctgtcatgccagttgaattgtctaaagatgttgcattttgatttgaggtttcatctgtattgtttgttgtatcttcattatgttctgtaaaaccttgtgattgtagatatttttcaacttcgcttgatgaataaaccacattcaaataatcctcatgtgtgatacatacagtaatcacttgcatgccaaaagcttcaactgtttgtctgttgatttctctatctaaaaagtgtattgtaaatgattttttaaaaagtaagtcagataagtcatctttaagtttaaaacctttaaacactttttcattaacgatggctaaaacgtctttgtcaaacttcaacattttttgcatgaattgaaattcatcatcataaaacgttaatttatcattatttacaaattcattaaaaccttttttaattaattctgatttaataaaatcaaataaagtcattgtatatctagccattgtattcactactttcatcattagacaatgtatctatcattgtgatttctgaagtaacttcatcgtcgtaatacggtttaatatctaaaccataacgttttgataagaatgtaatcggttcacgaccttttaaataaatattactatttgatgtggtaaaacctcggttgctttttgcctcttcgtccgaaacaccgctttccttatccactgctagtgagttaatacctaaatagttacttaattcactaattttattttggtattcgcgtttcatctcagttagtgctggaatcacactattactggttaaatctatgatatcatcatcggcgttaaacataggtgacattttaacaaatggtgcaccgttgtatatttccgatacaagttgattaactgactcatcattaatgtctgatttaaatattttgctaaattttgcttgcataattaatgagaatctagataaaacaacctcagataattcatcagtataatgttctataatttctatatcactattatattgaattggtttattttgcatgacaacaaagttaccactcatacagttatcatatattttatgaatctgtaagcattcatctggtattaaatagtctggaacaatgaaataaatatcatcttttgttaatcgtttttgaaattgaaagttaaagtttgatgaaaaatttggtgcttgattaaagtaagtattatttacgtaaccaagaatcataatttgttcatttcttgctttgccgaccactacattgatgttttgtcttaatgctgattctaattgaataaaatctataccaaccgtatcacgattggtatagttgatgagtagtggtaaaaattccaaataacgattaaacataagacgtttaaatctgttgcgatgttctacaactcttttgttgatttcttttgataattcaacctgtacacctttattatgtttagtcatttatagcacctctattattctgttcttggtgttacatcttggtcagtaattaaaattttattaaagaatgggctaatggctttaaatgaatagtaatgaatccagtgtgtgacttcatcaaattcaccattatagaatggttgttttaacataccttttgtgtaacgtttatatttaattgaattaatatccaaaataaacgcgtataaatctgattttggtttaatttcttcaacattatctttaaactctgatagttttgacacatcataagtgaatactgaaccaactggaattgtatcacctttatgagtttgataatcaccgtaagcacgtaagaaagctactgattcatcacttgatacgacaatatctttagtgactttgaaaacaccacctaggtcgtcaaaactgataacgtggtctgtaaagtcaatccctgctacttggaatgtgttcgcaatctttgtatctaaaagataagattttaagctatcagtcgttaaaataacaatatcttttaattttgaaactgttgtatattgtccgattgcaccacctgaagcacgatgaacttcattatatttagcgctgttgttttgtaagttaagaatagcttcaaaaactttacttgctaaatcttcttttgatgttgctttacgtacatttgattcagataattgattcaatgagtaatcaactaacattgcacgcatttctttttcttctaatacgttaatatcagaaattttctttttatagacacctaatgcataattagtagcgtctgctaatgtttggaaattgaaacgtgtgtcattgttatttaatgtaaatttttgtttcttcacaataccactaccatataacttagtagccatacgtggatagttacgtttcaacattagttcttcatttttagataagtccatgttaataggtactgtatccataattacatattcttcactgtattgacctataaagtcctgctctttagctaaccaattaaaacggttacctaatgcaatatcgattaataacgtttcattaatcttagggaataaaaatttatttacaaatgtttcaaacattgtattagaattatcccacttatcgccaaacgtccatgattttgaataagtatgattaaagtcttgtaatgcagatttagctgactttgcaactaatagtgctgtttcgttttttgtactcttttctgccatgatttattattcctcctcaacatcgccagtaaatgactgttttgaaagtgaatgaatttgtacaccataactatcttcacttttatttgtatcaattgacatattttcatttaattctgttcgtttatttaatcttgaatcttcatatgatgtacccatcatagaacgcatgttgttaccctcgtacatgtttaagttcctcctaatctaaatctaatttatcgacaagttcttcatctgaatagtctttatcattgttatctgtttcttttgattctggttgtggttgtggttgtggttgtggttgttgcatttgtgatgtttcaaaattagtaaatcgttgttctaatgaagcgatacgttgttctaaaacaactgggtctaattttgcacaatcttcatctgttgtagtaggttctaatttgttttcattttcttcttcgattgtttctactgttttatcttcagttgattcttcagttgattcttcagttgattctgaagtttcttcagttgattctgaagtttcttctttgtcgtctggttttacgatttcatcaaattctgtcattttgacacctccaaatattttataactaattatatcatagaatatttaaataagtaaattaaatttattttattttcaaatcataactttgaataaaagtcaatagatacataaattttgtatttaatgaatatgtaataggttagataagttggaaaagtagacgcacagtttttataagtttagtaaagaaatgatatgttaatttataagttttgatttgtataatcgtttattttaaacggtggggaggtgtaaatttac

SEQ ID NO: 118 - DNA, 18095 bp, Rosenblumvirus sp.
  source 1..18095: mol_type = genomic DNA
gtttaaaataaacgattatacaaatcaaaacttataaattcacttatcatttctttactaaacttataaaaactgtacgtctacttttccaacttatctaacctataacatattcatcaaatacaaaatttatgtatctattgacttttatcaaaatttatgatttgtatttaaaatctaatttcttctattaaatagtatttttaaattatttaaacttttttaagaaaaaccattgacaaaacttttaaacgtttgctatactatgtatgtaatcaaatcaaggaggtaacaaatggaaaatgtacaacctttacaaacttacattttaaaaaatggtaatatagttattgttatgggtaatacatcaacttatgaattaacattatttgtacttgaaaaggatgattttgaacaattagaccataattcacttaaaaaaatcgttgatgaaataaggaatgaaatcaatgatttaaggagtgataataatggttaatgttgataacgcacctgaagaaaaagggcaagcctatactgaaatgttgcaactattcaataagttgattcaatggaatccagcttatactttcgacaatgctattaatttagtatcagcttgccaacaactattattaaactataatagttctgttgttaaattcttaaatgatgaactaaacaacgaaactaaaccagaatctattttatcttacattgctggtgatgacccaatagaacaatggaatatgcacaaaggattttatgaaacgtataacgtttacgttttttagaaaggagtgatataataatgaaacctgatgatattgttacattacgaataaaaggttatattcttcattatttagatgataaaaatgaatatgttgaagaatttatcccacttcacgagtatcatttatcaaaatcacaagctaaagacttattacctaatacacacaaacttttatccactacacgacatactaaaactatgcaagtttattacaatgatttactacaaattgcaattgcagaaagcaaataatttaaataagaggagaaataaaaatgacaaacgtaaaagatattttatcaagacaccaaaacacattagcgagattcgaatttgaggaaaaagaaagagaatttatcaaactatcagaattagtagaaaaatacggtatgaaaaaagagtatatcgttagagcattattcacaaacaaagaatcaaaattcggtgtacaaggtgttatcgtcactgacgactataacgtaaacttaccgaatcacttaactgaattaattaaagacatgcgtcaagacgaggacgttgttaacattatcaatgctggtgaagttcaattcacaatttatgagtatgaaaataaaaaaggtcaaaaaggttattcaatcaactttggtcaagtatcattttaatacaatttcataggggatatttatcccctatttttatgaggtgctaaacaatggaaaaaatatacactgccgtattattatacaatgtatcaattaatgaaacatatgaacatgaaattgaacaattcgaaaaaataaataaagctaaggtaatatatagttattttgatgcaaacttttataaaaaaggtgcttataatctttgtgtaaaatacattaaggagatataaaaatgaatattacaacaatattaaacacaaaaaaattaattaattatattttagataatagagattgttttatgaataaaataacaaaatttgaatcactaagtggaaaatgtgttgtttttgttagatacggtgaaatttctattgaatactatgatagtgatacaaaatacaatgatttatttactttagacattgacgttgatgttcgtacatatagttttagttgtcttgaggttttttatcgagaacatttaaacccattatataaaaaagaagtttttatggattgtactattgatgacgtattagaatatttcgagaaaccaatagaaagtaatataacaataatttttcaaaacaaagtgatatataataacgggaacgtgatagaacatgactaatatattaaacatagctattgttttccttttagcatttttaattacacttgtaatacttatgacaatgcatatacgtgtgtcatttggtgttttatttactacattgattatattctacattatctttttagtggttatatatgggttatatggaggtcgttagcaatggttagacatacgtccgaaatggataaatggaaaaaagaaagagacgcaagaaaagagcaggaaaaagaattgtttttaaatgattttagtactgttaattttaaatttgatgataaagatttacaagaggcgtacatagacgcatggaaacatttcgcacatttgccctattttccaaaagaaagaaacgtgtcatatgtaaatgctgtatcattggtaagaggtaaaagacatgaacaattaaactatatacttgaaatatataaccgtaaagatgaatctaataataaaaacgctaaaaaacataaatatgctttatatgaattacaagctaaaaataataattcttctatgtataaatatattaaagaaattgacactttatacaaagaaattggtaaatcagacagaccagtgactactattgatgatgaagatgtgaggtataactttttatattatgcaacatttgaagactaattttaatactgtaaacgacatcataaactattataaggagcaaatacatggtgaaacaaaatcgtttagacatggtaagagattatcaaaatgctgtcaatcatgtcagaaaaaaaataccagataactataatcaaatagaattagttgatgaactcatgaatgatgatatagactattacatatctatttcaaaccgttctgacggaaaatcgttcaactatgtttcattctttatttatttagctataaaacttgatattaaatttactttattatcacgtcattatacattacgtgacgcttatcgtgattttattgaggaaatcatagacaaaaacccactattcaaatctaagcgtgtcacattcagaagcgctagggactatttagctatcatctatcaagataaggaaatcggtgtgattacagatttgaatagtgcaactgatttaaaatatcattctaactttttaaaacactaccctatcattatatatgatgaatttttagcacttgaagatgactatttaattgacgagtgggataagttaaaaacaatttatgaatcaatcgaccgtaaccatggtaatgttgattatatcggcttccctaaaatgtttttactaggtaatgctgtcaacttttcaagtcctatattatccaatttaaatatatataacttattacaaaaacataaaatgaacacatcacgactttacaaaaatatttttttagaaatgcgaagaaacgattacgtaaatgaaaagcgtaacacacgggcattcaattcaaacgatgacgctatgactactggcgagtttgaatttaacgaatataatttggcagatgataatttaagaaatcatatcaatcaaaacggtgattttttctatattaaaactgacgataaatatataaaaattatgtataatgttgatacatttaatgctaatattattgttataccttatacaaaacaatatgaattttgtactaaaatcaaagatatagatgacaatgttatttatttaagagaagatatgttttataaagaaaacatggagcgttattattacaatccaagcaatttacattttgataacgcttactcaaaaaattacgttgttgataatgatagatatttatatttagatatgaataaaattataaaatttcatataaaaaatgaaatgaagaaaaatatgagtgaatttgaaagaaaagaaaaaatatatgaagataactatattgaaaatacaaagaagtatttaatgaaacaatacggcttataaaaggtgtgtaagattatgggattactagaatgcatgcaatatcataaacatgaacgtcgaatgattttatactgggatatagaaacattagcgtacaataaagttaacggacgaaaaaaaccaaccaaatataaaaacgtaacgtattcagtagcaattggttggtttaatggttatgagattgatgtagaagtatttcctagttttgaatcgttttatgacgcattttatacgtatgtgaaacgacgtgatacaatcactaagtcaaaaacagatattatcatgattgcacataactgtaataagtatgacaaccattttttacttaaagataccatgcgttattttgataatatcacacgcgaaaatatatatttaaaatctgcagaagaaaacgaacacacactaaagatgcaagaggctactattttagctaaaaatcaaaatgtgattttagaaaaacgtgtgaaatcgtctattaatttagacttaacaatgtttttaaatggatttaaatttaatattattgataactttatgaaaaccaatacatcaattgcaacattaggtaaaaagttgcttgacggtggttatttaacagacgaccaacttaaaacagattttaattacacgatatttgataaagataacgatatgtcagatagtgaagcctatgactatgctgttaagtgttttgctaaactcacacctgaacaacttacatacattcataatgacgtgattatattaggtatgtgccatattcattatagtgatatatttccaaattttgactataacaaattaacattttcattgaatattatggaatcgtatttaaataatcaaatgacgcgttttcagttactcaatcaatatcaagatattaaaatatcatatacacattaccatttccatgatatgaatttttatgactatatcaaatcattttatcgtggtggtttaaatatgtataacactaaatacataaacaaacttattgatgagccttgtttttctattgatatcaattccagttatccttatgtgatgtatcatgagaaaattccgacatggttatacttttatgaacattattcagaacctacattaatccctacttttttagatgatgacaattatttttcattatataagattgataaagatgtatttaacaatgatttattaattaaaatcaaatcacgtgtattacgtcaaatgattgtaaaatactataataatgataatgattacgttaatattaatacaaatacattaagaataattcaagacattacgggtattgattgcacgcatatacgtgttaattcgtttgtgatatatgaatgtgaatactttcatgcacgtgatattatatttcaaaactattttattaaaacacaaggtaagttaaaaaacaaaatcaacatgacatcaccttacgactatcatattactgatgacatcaacgaacacccttactcaaatgaggaggttatgttgtctaaagttgtacttaacggattatatggcatacctgcattacgttcacattttaacttattccgtttagatgataacaatgaactatacaatattattaacggttacaaaaacacagaacgtaatattttattttctacatttgtaacatcacgttcattgtataacttattagtaccattccaatacttaacggaaagtgaaattgacgacaattttatttattgtgatactgatagtttgtatatgaaatccgttgttaaacccttattgaaccccagtttattcgacccgatagccttaggtaaatgggatattgaaaacgaacagatagataagatgtttgtactgaatcataaaaaatatgcatatgaagtgaatggaaagattaaaattgcttctgctggtatacctaaaagcgcctttgatacaagcgtcgattttgaaacctttgtacgtgaacaattctttgacggtgcgattatagaaaacaataaaagtatctataatgaacagggtacaatatcgatttatccgtctaaaacagaaattgtatgtggtaatgtatatgatgaatatttttctgatgaacttaatatgaaacgtgaatttatattaaaagacgctagagaaaattttgaccatagtcaatttgatgatattctttatattgaaagtgacattggttcgttttcacttaacgacttatttcctgttgaacgttcagttcataacaaatctgatttgcatatattaaaacgcgaacatgatgaattaaaaaaaggcaactgttaaataacagttgcctttttcttttgagataacatgaaaaatgtgtacgaaaattgattatgttttgtattttatttactagcattactagcatgtgttcattatagcatagttaattaagcaataccactgaagaatacaatattatcaccagcgttatgaggtacaccattaatcaatgtatataatacaacccgtgacggtgcgacgtatggtggtacgttatagtttgctactaagaatgaaccatcgtcaaatactgctacaacgacacctgtgtgaccaatgccatatgctgttgcttgtaagtatggtggtttacttgaaaaaccataaccaacagtagggttgtgtgttgtttttgcacctaactttttatagacgtaccatacacgttgaccgtttgtcacttgaccgtcgtctgtcggttgtcttttaccatgtaattgtgacatatacgcccatgttaattctgtacactgacctgcattacccgtttgaggaaatatgttacctggtttgtataaatattcttttttgaataaaggtacaccaattgcttttttatatttttctggtaactgtgcgtatgtccagttaccaccaatgacgcgaccacttttaccattaggtttgactgatttaccactaattggtttatggtctccgtcatcatcagtagggtttgaactactacccccactatctacttgcacgctatcaatcagtttttttaatgaatcgagtagcccaatcgtcattttaatatgatatgtgttgttaaatgttttttgtaatgtaaaataatcattactaaaaaatttgtcgctacctatactgtgtacatcccattgtaatgcgtcttgtactttttttaataattcttgcatggcttgttttgctaaagcgagcagtgaactaccactgtcaccactactaccactgtcagacgaatcactaggtgaaccacctttaccgtctaatttaccaccccacgcaagaatagtattcgcaccgtctaaaaaaggattaccatagttttgtactttattatatgacgctttcaaacctaggggataatatgccgcccaagtagccgctgctgttaatggaatatacgcacgtccgattgtacctgctttcatatttttagcaaaatctgcattaccttttctttgtacgtcttgcggtacaaaatgcactggattaccgtaatcataccaagacggttgtcctgcttgttttgattgtgatactaattttcttgcaatgaatttagcgtctgttaaatagtcacctcgtgcagatgtatggttcaaccaacctaaacccgcgctatacccttcatttttttcatatacagcaaaaagagtaggtgacacacctatctcttttactgcttttaatacttgtctgattttactttcattaccacctagccatacattaaagcgtccatacccttttactttagggactaactggtctatcgttaaaccgaaatcatcattaatatacgaatgcgtaaatttatctatcttctcttggtcgttcattattatcacccttttcagaatcgtttttaattactcttaatttatctttaatttgttctggtactaatacgtccatttctgcacaattttctacgatagataagccctcattagcgatataatagaaaatcgtaatcatgagtaagccaccttttaattgtaaaatctggtcaatgatgttagctaaaatgataatacagaatatcaataattttttagcaaaacctttcattgattttttagaccatagattattatttttaattgctttagcaaaaccagtaacaacatctataatcatcaaaacaaataaaaaatatagtaactttaaatcacctgcatatatgaacatatgaaatgcttctgtgtccgtaaatcttaattttacctcattcattttatacaccttctctaaatttattatttaacgggttctgtaacattggattacctgaaccgtcattatgccaaaatctcacaccagattctaaaattgcttttaattgttccattaacatggggtcaatgtcacgtatggtatacgtacctgtacattttaaatagttgcaaacagtcatactgttaattggttcaataaatgaattatagtcattcacttcaaaaccaaacaacatataatatttttgtaaaaatgtaatttctttaggtgacggtacactaattttcatcgttaaaccgttaatactgtttgcaatttggaatgcgttgcccatttccgactctgtcactgacggtggttgtaatgctaaatctttatattctgcttgttgttgtttgtagaaattatattcttcattaaacttaccaaataaagcagtcggacttaaattacttgctacacttacagcgtcataaaaacgtgattttgggtcactaccatttaatacattatctatacgacttgtgattaattgactttctgcattacgctgtctattggcttgttgtgattgtcctaaaattccgttattaattaatataggcacttgcgcaaaactattaaatgttatattggtatttaagaatgaacctgtatcaattaatatatctttatttttagcaagtatcggtctatcgttttcagcactgttataatcaactggatatactcgcacttcattatgataaccaatgatggattttgtacgtaacttaacacctgttttttgtgaaattttaccagcgtcaagtaacattgtgttaccgttccagtcataaaattcaatcgtcatgtactcattacgtatcatatgtttaaactcgtcttttttagacaacatcatctcttgaagctttgtgaaacttaatgataaatcgtttaaactccattcttttgattttccaccctgttttaatgtctttaatccagtaattttttcacttgtcttaacgtcctctaaatcttttgtattaataaaatctttaggtaacatttgaaccttttgaaagttttgtgtaatccatggatatgcactcattttatccataaagttaataaagtcaccatattccataacgtataagttgactggcgatgtgatattgtcatatatcgtacctttagacgtatctaagtttggctcttttttcgtaccaaatttctttgataaatcagcgcttgactggaataacactaaattttccaaatactgttgcatttggttatacacatagtttttatttgatacttttaacacatcatcattgttacgtaacatcggcaacatatagttatacgtacgctttgataagtgttgacgttcaatattaacgtttgaaagttgttctaatacattaccttgtgtatacgtcataatagtatcaatcacaaaatatatttttaccacaacatcattcacatattcgatttgattcacaaaagcgtaatagcgtctgtcctcaaaatctgataaaaacgtcatgtagttaatcccttgtgcgtcatgccactgcatatcaacattgatttccattctatcacgtataaaattatacggttgtttggaatagtctaatgatttaaaatgacgaccgtttaaaaaataatcatcacgctctttattactattaaaatgaattgtattttgatagtctgtaaacggtgtgttatagaaaaatttaaaatttgttaattttctcatttttacctccataaaaaatagtcgtataaataatttatacgactattataacatttttattcaatgatttgtgtatctattgcaaaacgtttatctccatttgttaagtcactatcgctataatttgatgtaacaaaatgtaattcattattaaagtttaaatataatcttgtattaatcattttcgaatcaatcgcactttgtgtgtagtgatgtgttgattttaagttagcgttaatcgtacctaatttaatatcaccgtttttcttaatcccttttaataccccttttaattgtatggttttaacaccattaattgttacaatacgatattgcggtgcgggataaccaccgttgctatcacttgcaactataccactttctagcaatatatcttgccaacctgtatcattaaattgtaattttgcactgttgattttttgatcaaaattttgttcaatttctgatttagattgtgcaattttagtatctatatttaagttgtccactcttgttgataaagtgttaatacttgattcatttgttgatgttttttgttttaaatcattaatatcattatcatattttgataaatcaatatgtccgtttccgtcaacaactggtctatcttttaattcttgaatatctttttcaatttttgatattttatcattatttgtttttaaagcagcgatgtcagatttaattgaattaatatcctgtgtataatctttttggttaatactgtttaattttgtttctaactcttttatcttatcaaggttggcatttgctttgatgtcattaatggtttgttctaaactttcaagtttcccagcacttgaattttgttttaacttattaatatcctcttgtatttcttgaattgtgttgtcattgttttgtttagattttaataattcaatctgttgttcaatatcttttattttatcaagattgatactttttttaacttcagctaattctctttttaacgcgtcaatgttttctgcaccagtattagctttaattaaattaatttcatttgtgtttcgtcctacactatctttagtagcgtttaacgattgtgtaagtgtttcatatttatcatcatactgtaacattgatttttcaaattcatttaattgtgtttgatgttgttctaaactttcatttaatatgacatctttttcttttaatgaatcaatctcttttttattactatcaatcattggttggaatttttttattttctctagaaatgttgatattttctctttattatcattaattgcaatatcatgattttctatttgaccactgtatttattaatcaatgtttttaaatcattataaaatgttaatttataataaccagtatcagtacggacataaatatgtccgtctgatgtactgattaagtcattttcttctgttaaaaaatctgctaacctgtctattgtttcaacttgtcttaaacttcttacgattctatcagccattgttcacacctcttatttgtatcgtttccaactaaactcaaagaaaaaacctaaaatacccattatgagaacaccccccaaggaataccaacactgtaactattacctgttttaccgttccattgtctcactggtaaataataacgtgtaccttcccaattgtaaccaatccatacatacccgtctgataaacaaacttcgtcatatggtgtatagccgtttggttggaaccaatagccattaagctcagataatttcggactaccgacacgagcaaatattggtaaaaaaccacatgtaaatgtagcattttcatttctgtaatatgtgccgtattggttttgtttccagttgttagtttgttgaatatttttttctaatactttactatcactatttgaaaattttggacgaataaaatgcgtaacaccgtcataataatgtgttcttattgttgctttttcccaaccatcatatccaccatttaaccagttttgttctaagcatgtataataatcaagatttccacttgttacacattgaatatgcccatattgagaattagtgtatacagcaacgtcacataattgaggtttaaagctaggtgtattttcatacaccgctgctaaacctttaaagtcgttgttaatggcgtctttggcattaccccacatgcgaactttaccgtcagtaatgtaataaacataagcaactgctaagtccatacattgaaaaccatatactccatcaaagtcaactccaacaccctcatgcttatatatccattcttttgcttgttgttgtgatttcatgaaacattatcctttcttgacccaactatattgacgtttttttgtatctgcattaacgttactaaagaattctttatgttcggacacattagcctctaatgtttgtcttacttcaccgacagcgttaccacttgaaacacgtaaccatgcacccacttttttaatttcttctggtgcgtctctaaacaattccatttggttaccagtaatataatattcaccaggtgtcgtaacgtaagctatccagttattgtattgacttgcttctaaatactcttgatatggtgcgtctgttttgattgttgtccataaaccataatcccattttaatgtaaatacatcgagcgtcataccacgcatgattttaaccatttttcgaccagtagaaaaacgcgttaattcttgtactgtacctaatgtttgtgttgtagggtatacattgatgaaacaaccagcgtctataatttttttactaccattcattggcatatttttaagtttactagctgtaccaccgtcaatataatagaaccctgcttgtgttaagtcatttaagtcgtcaatatggtctggaattgataacgcacgtccatcgtcttttgttaatttatagttttgtgaacctctcgcacgtaatgcttcaaagtgttcatactcaccaagttgaaagaacccatataaattattgaatcgttttccaccaccgccattagtcatagcaagtaataacgatttacgttttgtttttggattggtataaatacaaataccctccggctctttaaagttatcacgtggaaaattaataccgtcttgatatgataatttaaacggataatcataaatcttttgaccagttgttaatgaatatttaccaatttgaacgtgtgaattaactgaactgttaccacttaaccagtataaatcatcaccatcaacggcaatcccttgcatccatcgattatcattgttttctgaattatcaatcgtcatttctttttctacattatcaatgtgattttttacgtcagctcttgaacgtacctgtattgtcccgtcaccgaatcttaaaacgattttgtcattttcttcatcaattaacggtgtaaacgtgtgtttgtttaaaagtgactgtggtgtataatctgttaaccctttagcctcttctaaatctaaaatataattatctttatatgcgacttgtaacagttttgctacaccgtcatgatgtaaccatattttcatttcaccgttagattgtctttctaaacctattgtagtaccgtgaccaccttgtacaatacgcatactagaaattaagtcaccgctaggcgttaatttattaatccaaaaaccttctgggttttgtgaatctgattgtgtagagtacatttgattcgtttctttatctatgtttatagattggttaacagcattacgaataccaccgaatcccataacaaactttggttcaagctcatttaattcaaaaccattaacaaaacggtcaatgtctttaattaagtctttaacttctgctttaaaatcattcatttgtttcatttctgcaactttaaataatgcaaatgcagatgtaagaccagtactatatttagtaaattcatcatgaataattttatctattgtaccgtcgtttaaccaacctctaaataagtctttcgcttggtctgggaatgctttcattaaatcgtcccagtttctaaaacgtttttttaactcaccgtcatagtcccaaatacgatgtgctaatacttcaatgagctttgataatcttgaaatataatcataatatgattttgaattggtattataatctgctctatcatcgtaaaacggtgtgtaacgttctctcgttttatatatttcgtctaaaaatggacgaatgtcgtcaaaatatttaaaatcgttttcattatatgccataattttccacctttaccaaatttgtaaaaaacattttttatcaaattcatttaaaattttctttcttaaatcgtatactttatcaatattatcaattaaatactgttttgaaaattgtgtacctttcgcattacctttttgattttgattacgttttgcgttttgattactttcgttacttgatttattcacagttttaccgttgtcaattgtattattatctgcaaatcgtaacgttgtgttatctacatctatgttaacctcgctttgtggtaatgacacataagcatttctgtttgctgtcatgccagttgaattgtctaaagatgttgcattttgatttgaagtttcatcagtgttgcttattgtatcttcgttgtgttctgtgaagccttgtgattgaagatatttttctacttcacttgatgaataaaccacattcaaataatcctcatgtgtgatacatacagtaatcacttgcatgccaaaagcttcaactgtttgtctgttgatttctctatctaaaaagtgtattgtaaatgattttttaaaaagtaagtcagataagtcatctttaagtttaaaacctttaaacactttttcattaacgatggctaaaacgtctttgtcaaacttcaacattttttgcatgaattgaaattcatcatcataaaacgttaatttatcattatttacaaattcattaaaaccttttttaattaattctgatttaataaaatcaaataaagtcattgtatatctagccattgtattcactactttcatcattagacaatgtatctatcattgtgatttctgatgtaacttcatcgtcgtaatacggtttaatatctaaaccatatcgttttgataagaatgtaataggttcacgaccttttaaataaatattactatttgatgtggtaaaacctcggttgctttttgcctcttcgtcagaaacaccgctttccttatccactgctagtgaattaatacctaaatagttacttaattcactaattttattttggtattcacgtttcatctcagttagtgctggaatcacactattactggttaaatctatgatatcatcatcggcgttaaacataggtgacattttaacaaatggtgcaccgttgtatatttccgatacaagttgattaactgactcatcattaatgtctgatttaaatattttgctaaattttgcttgcataattaatgagaatctagataaaacaacctcagataattcatcagtataatgttctataatttctatatcactattatattgaattggtttattttgcattacaacaaaattaccactcatacagttatcatatattttatgaatctgtaagcattcatctggtattaaatagtctggaacaatgaaataaatatcatcttttgttaatcgtttttgaaattgaaaattgaaatttgatgaaaagtttggggcttgattaaaataagtgttgttaacatagcccaaaatcataatttgttcatttcttgctttaccaacaacaacattaatgttttgccttaatgcagattctaattgaataaaatctataccaaccgtatcacgattggtatagtttattaataggggtaaaaattccaaataacgattaaacataagacgtttaaatctgttgcgatgttctacaacacgtttattgatttctttagataattcaacctgtacgcctttattatgtttagtcatttatatcacctctattattctgttctcggtgttacatcttggtcagtaattaaaattttgttaaagaatgggctaatggctttaaatgaatagtaatgaatccagtgtgtaacttcatcaaattcaccattatagaatggttgttttaacattccttttgtgtaacgtttatatttaattgaattaatatccaaaataaaagcgtataaatctgattttggtttaatttcttcaacgttagacttaaattcagataaatttgaaacatcataagtgaatactgaaccaactggaattgtatcacctttatgagtttgataatcaccgtaagcacgtaagaaattaactgattcgtcacttgatacgacaatatctttagtaactttaaaaactccacctaaatcatcaaaactaataacgtggtctgtaaagtcaatccctgctacttggaacgtgttcgcaatctttgtatctaaaagataagattttaagctatcagtcgttaatataacaatatcttttaattttgaaactgttgtatattgtccaatagcgccacctgaagcacgatgaacttcattatatttagcactgttgttttgtaagttaagaatagcttcaaaaactttacttgctaaatcttcttttgatgttgctttacgtacatttgattcagataattgattcaatgaataatcaactaacattgcacgcatttctttttcttctaatacgttaatatcagaaattttctttttatagacacctaatgcataattagttgcgtctgctaatgtttggaaattaaagcgtgtatcattgttatttaatgtgaatttttgtttcttcacaataccactaccatataacttagtagccatacgtggataattacgttttaacattaattcttcatttttagataaatccatgttaataggtactgtgtccataattacatattcttcactgtattgaccaataaagtcctgctctttagctaaccaattaaaacgattacctaatgcaatatcgattaataacgtttcattaatcttagggaataaaaatttatttacaaatgtttcaaacattgtattagaattatcccacttatcgccaaacgtccatgattttgaataagtatgattaaagtcttgtaatgcagatttagctgactgtgcaactaatagtgctgtttcgttttttgtactcttttctgccatgatttattattcctcctctacatcgccagtgaatgactgttttgaaagtgaatgaatttgtacaccataactatcttcacttttgtttgtatcaattgacatattttcatttaattctgttcgtttatttaatcttgaatcttcatatgatgtgcccatcatagaacgcatattgttaccctcatacatgtttaaattcctcctaatctaaatctaacttatccactaattcttcatctgaataatctttgtcgttgtcatctgcttcagtaacatctggttgtggttgtggttgtggttgtggttgttgcatttgtgatgtttcaaaattagtaaatcgttgttctaatgaagcgatacgttgttctaaaacaacagggtctaattttgcactatcttcatcagtaatagtaggttctaatttgttttcattttcttcttcaattgtttctactgattcactttcagacgattcttcagtttcttctgttgattcttcagttgattcttcagttgattctgaagaatcttctttctcgtcaggttttataatttcttcaaattcagtcattaatacacacctccaaatattttatatcttattatatcatagaatatttaaataagtaaattaaaattattttaagttcaaatcataaattttgataaaagtcaatagatacataaattttgtatttgatgaatatgttataggttagataagttggaaaagtagacgtacagtttttataagtttagtaaagaaatgataagtgaatttataagttttgatttgtataatcgtttattttaaacggtggggaggtgtaattt

SEQ ID NO: 119 - DNA, 18112 bp, Rosenblumvirus sp.
  source 1..18112: mol_type = genomic DNA
ttgtaaaattacacctccccaccgtttaaaataaacgattatacaaatcaaaacttataaattaacttatcatttctttactaaacttataaaaactgtgcttctacttttccaacttatcaaacctataacatattcataaaatacaaaatatatgtatctattgacttttattcaaaattatgatttgtatttaaaatctaatttcttctattaaatagtatttttaaattatttaaactttttaagaaaaaccattgacaaaacttttaaacgtttgctatactatgtatgtaatcaaatcaaggaggtaacaaaatggaaaatgtacaacctttacaaacttacattttaaaaaatggtaatatagttattgttatgggtaatacatcaacttatgaattaacattatttgtacttgaaaaggacgattttgaacaattagaccataattcacctaaaaaaatcgttgatgaattaaggaatgaaatcaatgatttaaggagtgataataatggttaatgttgataatgcacctgcagaaaaaggtcaagcatatactgaaatgttgcaactattcaataaacttattcaatggaatccagcttatactttcgacaatgcaattaacttagtatcggcttgccaacaactattattaaactataatagttctgttgttcaattcttaaatgatgaactaaacaacgaaactaaaccagaatctattttatcttacattgctggtgatgacccaatagaacaatggaatatgcacaaaggattttatgaaacgtataacgtttacgttttttagaaaggagtgatataataatgaaacctgatgatattgttacattacgaattaaaggttatattcttcactatttagatgataaaaatgaatatgttgaagaatttattccacttcatgagtatcatttatcaaaaacacaagcaaaagatttattacctaattcacacaaacttttatccactacacgcacaacgaaaacaattcaagtttattacaatgatttactacaaatttcaattccagaaagcaaataatttaaataagaggagaaataaaaatgacaaacgtaaaagatattttatcaagacaccaaaacacattagcgagatttgaatttgaggaaaaagaaagagaatttattaaactatcagaattagtagaaaaatacggtatgaaaaaagagtatatcgttagagcattattcacaaacaaagaatcaaaattcggtgaacaaggtgttatcgtcactgacgactataacgtaaacttaccgaatcacttaactgaattaattaaagacatgcgtcaagacgaggacgttgttaacattatcaatgctggtgaagtgcaatttacaatttatgaatatgaaaacaaaaaaggtcaaaaaggttactcaatcaactttggtccagtatcattttaatacaattttataggggatatttatcccctatttttatgaggtgctaaacaatggaaaaaatatacactgccgtattattatacaatgtatcaattaatgaaacatatgaacatgaaattgaacaattcgaaaaaataaataaagttaaggtaatatatagttattttgacgcaaacttttacaaaaaaggtgcatataatctttgtgtaaaatacattaaggagatataaaatgaatattacaacaatattaaacacaaaaaaattaattaattatattttagataatagagattgttttatgaataaaataacaaaatttgaatcactaagtggaaaatgtgttgtttttgttagatacggtgaaatttctattgaatactatgatagtgatacaaaatacaatgatttatttactttagacattgacgttgatgttcgtacatatagttttagttgtcttgaggttttttatcgagaacatttaaacccattatataaaaaagaagtttttatggattgtactattgatgacgtattagaatatttcgagaaaccaatagaaagtaatataacaataatttttcaaaacaaagtgatatataataacgggaacgtgatagaacatgactaatatattaaacatagctattattttccttttagcatttttaattacacttgtaatacttatgacaatgcatatacgtgtgtcatttggtgttttatttactacattgattatattctacattatctttttagtggttatatatgggttatatggaggtcgttagcaatggttagacatacgtccgaaatggataaatggaaaaaagaaagagacgcaagaaaagagcaggaaaaagaattgtttttaaatgattttagtactgttaattttaaatttgatgataaagatttacaagaggcgtacatagacacatggaaacatttcgcacatttgccctattttccaaaagaaagaaacgtgtcatatgcaaatgccgtatcattggtaagaggtaaaagacatgaacaattaaactatatacttgaaatatataaccgtaaagatgaatctaataataaaaacgctaaaaaacataaatatgctttatatgaattacaagctaaaaataataattcttctatgtataaatatattaaagaaattgacactttatacaaagaaattggtaaatcagacagaccagtgactactattgatgataaagatgtgaggtataactttttatattatgcaacatttgaagagtaattttaatactgtaaacgacatcataaactattataaggagcaaaaacatggtgaaacaaaatcgtttagacatggtaagagattatcaaaatgctgtcaatcatgtcagaaaaaaaataccagataactataatcaaatagaattagttgatgaactcatgaatgatgatatagactattacatatctatttcaaaccgttctgacggaaaatcgttcaactatgtttcattctttatttatttagctataaaacttgatattaaatttactttattatcacgtcattatacattacgtgacgcttatcgtgattttattgaggaaatcatagacaaaaacccactattcaaatctaagcgtgtcacattcagaagcgctagggactatttagctatcatctatcaagataaggaaatcggtgtgattacagatttgaatagtgcaactgatttaaaatatcattctaactttttaaaacactaccctatcattatatatgatgaatttttagcacttgaagatgactatttaattgacgagtgggataagttaaaaacaatttatgaatcaatcgaccgtaaccatggtaatgttgattatattggctttcctaaaatgtttttactaggtaatgcagtcaacttttcaagtcctatattatccaatttaaatatatataacttattacaaaaacataaaatgaacacatcacgactttacaaaaacatttttttagaaatgcgaagaaacgattacgtaaatgaaaagcgtaacacacgggcattcaattcaaacgatgacgctatgactactggcgagtttgaatttaacgaatataatttggcagatgataatttaagaaatcatatcaatcaaaacggtgattttttctatattaaaactgacgataaatatataaaaattatgtataatgttgatacatttaatgctaatattattgttataccttatacaaaacaatatgaattttgtactaaaatcaaagatatagatgacaatgttatttatttaagagaagatatgttttataaagaaaacatggagcgttattattacaatccaagcaatttacattttgataacgcttactcaaaaaattacgttgttgataatgatagatatttatatttagatatgaataaaattataaaatttcatataaaaaatgaaatgaagaaaaatatgagtgaatttgaaagaaaagaaaaaatatatgaagataactatattgaaaatacaaagaagtatttaatgaaacaatacggcttataaaaggtgtgtaagattatgggattactagaatgcatgcaatatcataaacatgaacgtcgaatgattttatactgggatatagaaacattagcgtacaataaagttaacggacgaaaaaaaccaaccaaatataaaaacgtaacgtattcagtagcaattggttggtttaatggttatgagattgatgtagaagtatttcctagttttgaatcgttttatgacgcattttatacgtatgtgaaacgacgtgatacaatcactaagtcaaaaacagatattatcatgattgcacataactgtaataagtatgacaaccattttttacttaaagataccatgcgttattttgataatatcacacgtgaaaatatatatttaaaatctgcagaagaaaacgaacacacactaaagatgcaagaggctactattttagctaaaaatcaaaatgtgattttagaaaaacgtgtgaaatcgtctattaatttagacttaacaatgtttttaaatggatttaaatttaatattattgataactttatgaaaacaaatacatcaattgcaacattaggtaaaaagttgcttgacggtggttatttaacagacgaccaacttaaaacagattttaattacacgatatttgataaagataacgacatgtcagatagtgaagcctatgactatgccgtaaagtgttttgctaaactcacacctgaacaacttacatacattcataatgacgttattatattaggtatgtgccatattcattatagtgatatatttccaaattttgactataacaaattaacattttcattgaatattatggaatcgtatttaaataatcaaatgacgcgttttcagttactcaatcaatatcaagatattaaaatatcatatacacattatcatttccatgatatgaatttttatgattatatcaaatcattttatcgtggtggtttaaatatgtataacactaaatacataaacaaacttattgatgagccttgtttttctattgatatcaattccagttatccttatgtgatgtatcatgagaaaattccgacatggttatacttttatgaacattattcagaacctacattaatccctacttttttagatgatgacaattatttttcattatataagattgataaagatgtatttaacaatgatttattaattaaaatcaaatcacgtgtattacgtcaaatgattgtaaaatactataataatgataatgattacgttaatattaatacaaatacattaagaatgattcaagacattacgggtattgattgcacgcatatacgtgttaattcgtttgtgatatatgaatgtgaatactttcatgcacgtgatattatatttcaaaactattttattaaaacacaaggtaagttaaaaaacaaaatcaacatgacatcaccttacgactatcatattactgatgacatcaacgaacacccttactcaaatgaggaggttatgttgtctaaagttgtacttaacggattatatggcatacctgcattacgttcacattttaacttattccgtttagatgataacaacgaactatataatatcattaacggttacaaaaacactgaacgtaatatattattctctacatttgtcacatcacgttcattatataacttattggtacctttccaatacttaactgaaaatgaaattgacgacaattttatttattgcgatactgatagtttgtatatgaaatccgttgttaaacccttattgaaccccagtttattcgacccgatagccttaggtaaatgggatattgaaaacgaacagatagataagatgtttgtactgaatcataaaaaatatgcatatgaagtgaatggaaagattaaaattgcttctgctggtataccgaaaagcgcctttgatacaagcgtcgattttgaaacctttgtacgtgaacaattctttgacggtgtgataatagaaaacaataaaagtatctataacgaacagggtacgatatcgatttatccgtctaaaacagaaattgtatgcggtaatgtatatgatgaatattttactgatgaacttaatatgaaacgtgaatttatcttaaaagacgctagagaaaattttgaccatagtcaatttgatgatattctttatattgaaagtgacatcggttcattctcacttaatgacttatttccagttgtacgttcagtgcataataaatctaatttgcatatattaaaacgtgaacacgatgaattaaaaaaaggcaactgttaaataacagtcgcctttttcttttgatataacatgaaaaatgtgtacgaaaattgattatgttttgtattttatttactagcattactagcatgttttcattatagcatagttaattaagcaataccactgaagaatacaatattatcaccagcgttatgaggtacaccattaatcaatgtatataatacaacccgtgacggtgccacgtatggtgggacgttatagtttgctactaagaatgaaccatcgtcaaatactgctacaacgacacctgtgtgaccaatgccatatgctgttgcttgtaagtatggtggtttacttgaaaaaccataccctactgttggattatgtgttgtttttgcacctaactttttatatacgtaccacacacgttgaccgtttgttatttgaccgtcgtctgttggttgtcttttaccatgtaattgtgacatatatgcccatgttaattctgtacattgtcctgcattacccgtttgaggaaatatgttacctggtttgtacaagtattcttttttgaataaaggtacaccaattgcttttttatatttttctggtaactgtgcatacgtccagttaccaccaatgacgcgtccacttttaccatttggtttgactgacttaccactaattggtttatggtccccgtcatcatcagtagggtttgaactactatccccactatctacttgcacactatcaatcagtttttttaatgaatcaagtagcccaatcgtcattttaatatgatatgtgttgttaaatgttttttgtaatgtaaaataatcattactaaaaaatttatcactaccaatactgtgtacatcccattgtaatgcgtcttgtactttttttaataattcttgcatggcttgttttgctaaagcgagcagtgaactaccactgtcaccactactaccactgtcagacgaatcactaggtgaaccacctttaccgtctaatttaccaccccatgctaaaatagtatttgcaccgtctaaaaaaggattaccatagttttgtactttattatatgacgctttcaaacctaggggataatatgccgcccaagtagccgctgctgttaatggaatatacgcacgtccgattgtacctgctttcatatttttagcaaaatctgcattaccttttctttgtacgtcttgaggtacaaagtgaacgatgttacctgcgtcataccaagacggttgtcctgcttgttttgattgtgatactaattttcttgcaatgaatttagcgtctgttaaatagtcacctcgtgcagatgtatggttcaaccaacctaaaccagcgctatacccttcatttttttcatatacagcaaaaagagtaggtgacacacctatctcttttactgcttttaatacttgtctgattttactttcattaccacctagccatacattaaagcgtccatacccttttactttagggactaactggtctatcgttaaaccgaaatcatcattaatatacgaatgcgtaaatttatctatcttctcttggtcgttcattattatcacccttttcagaatcgtttttaattactcttaatttatctttaatttgttcaggcactaatacgtccatttcagcacaattttcaacaatagatagtccctcatttgcgatataatagaaaatcgtaatcatgagtaaaccaccttttaattgtaaaatctggtcaatgatgttagctaaaatgataatacagaatatcaataattttttagcaaaacctttcattgattttttagaccatagattattatttttaattgctttagcaaaaccagtaacaacatctataatcatcaaaacaaataaaaaatatagtaactttaaatcacctgcatatatgaacatatgaaatgcttctgtgtccgtaaatcttaattttacctcattcattttatacaccttctctaaatttattatttaacgggttctgtaacattggattacctgaaccgtcattatgccaaaatctcacaccagattctaaaattgcttttaattgttccattaacatagggtcaatgtcacgtatggtatacgtacctgtacattttaaatagttgcatacagtcatgctgttaataggttcaatgaatgtattatagtcatttacttcaaaaccaaacaacatataatatttttgtaaaaatgtaatttctttaggtgacggtacactaattttcatcgttaaaccgttaatgctatttgcaatttggaatgcgtttcccatttctgattctgtcacagatggtggttgtaaggctaaatctttatattctgcctgttgttgtttgtagaaattatattcttcattaaacttaccaaataaagcggttggacttaaattacttgctacacttacagcgtcataaaaacgtgattttgggtcactaccatttaatacattatctatacgacttgtgattaattgactttctgcattacgctgtctattggcttgttgtgattgtcctaaaattccgttattaattaatataggcacttgcgcaaaactattaaatgttatattggtatttaagaatgaacctgtatcaattaatatatctttatttttagcaagtatcggtctatcgttttcagcactgttataatcaactggatatactcgcacttcattatgataaccaatgatggattttgtacgtaacttaacacctgttttttgtgaaattttaccagcgtcaagtaacattgtgttaccgttccagtcataaaattcaatcgtcatgtactcattacgtatcatatgtttaaactcgtcttttttagacaacatcatctcttgaagctttgtgaaacttaatgataaatcgtttaaactccattcttttgattttccaccctgttttaatgtctttaatccagtaattttttcacttgtcttaacgtcctctaaatcttttgtattaataaaatctttaggtaacatttgaaccttttgaaagttttgtgtaatccatggatatgcactcattttatccataaagttaataaagtcaccatattccataacgtataagttgactggcgatgtgatattgtcatatatcgtacctttagacgtatctaagtttggctcttttttcgtaccaaatttctttgataaatcagcgcttgactggaataacactaaattttccaaatactgttgcatttggttatacacatagtttttatttgatacttttaacacatcatcattgttacgtaacatcggcaacatatagttatacgtacgctttgataagtgttgacgttcaatattaacgtttgaaagttgttctaatacattaccttgtgtatacgtcataatagtatcaatcacaaaatatatttttaccacaacatcattcacatattcgatttgattcacaaaagcgtaatagcgtctatcctcaaaatctgataaaaacgtcatgtagttaatcccttgtgcgtcatgccactgcatatcaacattgatttccattctatcacgtataaaattatacggttgtttggaatagtctaatgatttaaaatgacgaccgtttaaaaaataatcatcacgctctttattactattaaaatgaattgtattttgatagtctgtaaacggtgtgttatagaaaaatttaaaatttgttaattttctcatttttacctccataaaaaatagtcgtataaataatttatacgactattataacatttttattcaatgatttgtgtatctattgcaaaacgtttatctccatttgttaagtcactatcgctataatttgatgtaacaaaatgtaattcattattaaagtttaaatataatcttgtattcatcattttattatcaatcgcacattgtgtgtagtgatgtgttgattttaagtttgcgttaatcgtacctaatttaatatcaccgtttttcttaatcccttttaataccccttttaattgtatggttttaacaccattaattgttacaatacgatattgcggtgcgggataacccccgttgctatcacttgcaacaataccactttcaagttgcacatcttgccaacctgtatcattaaattgtaattttgcactgttaattttttgatcaaaattttgttcaatttctgatttagattgtgcaattttagtatctatatttaagttatccacttttgttgataaaacgcttatacttgattcgtttgttgatgttttttgttttaaatcactaatatcattatcatattttgataaatcaatatgaccgtttccgtcaacaactggtctgtcttttaattcttgaataactttttcaatttttgatattttatcattatttgtttttaaagtagcgatgtcagatttaattgaattaatatcctgtgtataatctttttggttaatactgtttaattttgtttctaactcttttatcttatcaaggttggtatttgctttgatgtcattaatggtttgttctaaactttcaagtttcccagaacttgaattttgttttaacttattaatatcctcttgtatttcttgaattgtgttgtcattgttttgtttagattttaataattcaatttgactttctatgtcttttattttatcaagattaacactttttttaacttcagctaattctctttttaatgcgtcaatgttttctgcaccagtatttgatttaattatattaatttcatttgtgtttcgtcctacactatctttagtagcgtttaaagattgtgtaagtgtttcatatttatcatcatactttaacattgatttttcaaattcatttaattgtgtttgatgttgttctaaactttcatttaatatgacatttttttcttttaatgaatcaatgtcttttttattactatcaatcattggttggaatttttttattttctctagaaatgttgatattttttctttgttatcattaattgcaatatcatgatgttctatttgaccactgtatttattaatcaatgtttttaaatcattataaaatgttaatttataataaccagtatcagtacggacataaatatgtccgtctgatgtactgattaagtcattttcttctgttaaaaaatctgctaacctgtctattgtttcaacttgtcttaaacttcttacgattctatcagccattgttcacacctcttatttgtatcgtttccaactaaactcaaagaaaaaacctaaaatacccattatgagaaaaccccccaaggaataccaacactataactattacccgttttaccgttccattttcttactggtaaataataacgtgtaccttgccagttgtaaccaatccatacatacccatctgataaacaaacttcgtcatatggtgtataaccatttggttggaaccaatatccattaggttcacttaatttaggactacctacacgtgcaaatattggtaaaaatccacatgtaaatgttgcattttcatttctgtaatatgtgccatattggttttgtttccattttccgaatgtgtttacttttgatgtttctaattcgttgctgttactagcagaaaatttaggtctaataaagtgtgttacaccgtcataataatgtgttcttattgttgctttttcccaaccgtcaaacccaccacctaaccagttttgctctaaacatgtataataatctaaattaccacttaacacacattgaatatgtccatattgtccatctgtatatacaccaacatcccctaattgtggtttaaagttcggtgtattttcatacaccattgctaaacctttaaagtcattattgattgcgtctttagcgttaccccacatacgaactttaccgtctgtaatgtaatatatataagcaacagctaagtcagcgcattgataaccaaatgctaaatcaaagtccacacctacaccctcatgcttatatatccattcttttgcttgttgttgtgatttcatgaaacattatcctttcttaacccaactatattgacgtttttttgtatctgcattaacgttactaaagaattctttatgttcggacacattagcctctaatgtttgtcttacttcaccgacagcgttaccacttgaaacacgtaaccatgcacccacttttttaatttcttctggtgcgtctctaaacaattccatttggttaccagtaatataatattcaccaggtgtcgtaacgtaagctatccagttattgtattgacttgcttctaaatactcttgatatggtgcgtctgttttgattgttgtccataaaccataatcccattttaatgtaaatacatcgagcgtcataccacgcatgattttaaccatttttcgaccagtagaaaaacgcgttaattcttgtactgtacctaatgtttgtgttgtagggtatacattgatgaaacaaccagcgtctataatttttttactaccattcattggcatatttttaagtttactagctgtaccaccgtcaatataatagaaccctgcttgtgttaagtcatttaagtcgtcaatatggtctggaattgataacgcacgtccatcgtcttttgttaatttatagttttgtgaacctctcgcacgtaatgcttcaaagtgttcatactcaccaagttgaaagaacccatataaattattgaatcgttttccaccaccgccattagtcatagcaagtaataacgatttacgttttgtttttggattggtataaatacaaataccctccggctctttaaagttatcacgtggaaaattaataccgtcttgatatgataatttaaacggataatcataaatcttttgaccagttgttaatgaatatttaccaatttgaacgtgtgaattaactgaactgttaccacttaaccagtataaatcatcaccatcaacggcaatcccttgcatccatcgattatcattgttttctgaattatcaatcgtcatttctttttctacattatcaatgtgattttttacgtcagctcttgaacgtacctgtattgtcccgtcaccgaatcttaaaacgattttgtcattttcttcatcaattaacggtgtaaacgtgtgtttgtttaaaagtgactgtggtgtataatctgttaaccctttagcctcttctaaatctaaaatataattatctttatatgcgacttgtaacagttttgctacaccgtcatgatgtaaccatattttcatttcaccgttagattgtctttctaaacctattgtagtaccgtgaccaccttgtacaatacgcatactagaaattaagtcaccgctaggcgttaatttattaatccaaaaaccttctgggttttgtgaatctgattgtgtagagtacatttgattcgtttctttatctatgtttatagattggttaacagcattacgaataccaccgaatcccataacaaactttggttcaagctcatttaattcaaaaccattaacaaaacggtcaatgtctttaattaagtctttaacttctgatttaaaatcattcatttgtttcatttctgcaactttaaataatgcaaatgcagatgtaagaccagtactatatttagtaaattcatcatgaataattttatctattgtaccgtcgtttaaccaacctctaaataagtctttcgcttggtctgggaatgctttcattaagtcgtcccaatttttgaaacgtttttttaattcattgtcatagtcccaaatacgacgtgctaatacttcaattagttttgataatcttgaaatataatcataatatgattttgaattggtattataatctgctctatcatcgtaaaacggtgtgtaacgttctctcgttttatatatttcgtctaaaaatggacgaatgtcgtcaaaatatttaaaatcgttttcattatatgccataattttccacctttaccaaatttgtaaaaaacattttttatcaaattcatttaaaattttctttcttaaatcgtatactttatcaatattatcaattaaatactgttttgaaaattgtgtacctttcgcattacctttttgattttgattacgttttgcgttttgattactttcgttacttgatttattcacagttttaccgttgtcaattgtattattatctgcaaatcgtaacgttgtgttatctacatcaatgttaacctcgctttgtggtaatgacgcataagcatttctgttcgctgtcatgccagttgaattgtctaaagatgttgcattttgatttgaggtttcatctgtattgtttgttgtatcttcattatgttctgtaaaaccttgtgattgtagatatttttcaacttcgcttgatgaataaaccacattcaaataatcctcatgtgtgatacatacagtaatcacttgcatgccaaaagcttcaactgtttgtctgttgatttctctatctaaaaagtgtattgtaaatgattttttaaaaagtaagtcagataagtcatctttaagtttaaaacctttaaacactttttcattaacgatggctaaaacgtctttgtcaaacttcaacattttttgcatgaattgaaattcatcatcataaaacgttaatttatcattatttacaaattcattaaaaccttttttaattaattctgatttaataaaatcaaataaagtcattgtatatctagccattgtattcactactttcatcattagacaatgtatctatcattgtgatttctgaagtaacttcatcgtcgtaatacggtttaatatctaaaccataacgttttgataagaatgtaatcggttcacgaccttttaaataaatattactatttgatgtggtaaaacctcggttgctttttgcctcttcgtccgaaacaccgctttccttatccactgctagtgagttaatacctaaatagttacttaattcactaattttattttggtattcgcgtttcatctcagttagtgctggaatcacactattactggttaaatctatgatatcatcatcggcgttaaacataggtgacattttaacaaatggtgcaccgttgtatatttccgatacaagttgattaactgactcatcattaatgtctgatttaaatattttgctaaattttgcttgcataattaatgagaatctagataaaacaacctcagataattcatcagtataatgttctataatttctatatcactattatattgaattggtttattttgcatgacaacaaagttaccactcatacagttatcatatattttatgaatctgtaagcattcatctggtattaaatagtctggaacaatgaaataaatatcatcttttgttaatcgtttttgaaattgaaagttaaagtttgatgaaaaatttggtgcttgattaaagtaagtattatttacgtaaccaagaatcataatttgttcatttcttgctttgccgaccactacattgatgttttgtcttaatgctgattctaattgaataaaatctataccaaccgtatcacgattggtatagttgatgagtagtggtaaaaattccaaataacgattaaacataagacgtttaaatctgttgcgatgttctacaactcttttgttgatttcttttgataattcaacctgtacacctttattatgtttagtcatttatagcacctctattattctgttcttggtgttacatcttggtcagtaattaaaattttattaaagaatgggctaatggctttaaatgaatagtaatgaatccagtgtgtgacttcatcaaattcaccattatagaatggttgttttaacataccttttgtgtaacgtttatatttaattgaattaatatccaaaataaacgcgtataaatctgattttggtttaatttcttcaacattatctttaaactctgatagttttgacacatcataagtgaatactgaaccaactggaattgtatcacctttatgagtttgataatcaccgtaagcacgtaagaaagctactgattcatcacttgatacgacaatatctttagtgactttgaaaacaccacctaggtcgtcaaaactgataacgtggtctgtaaagtcaatccctgctacttggaatgtgttcgcaatctttgtatctaaaagataagattttaagctatcagtcgttaaaataacaatatcttttaattttgaaactgttgtatattgtccgattgcaccacctgaagcacgatgaacttcattatatttagcgctgttgttttgtaagttaagaatagcttcaaaaactttacttgctaaatcttcttttgatgttgctttacgtacatttgattcagataattgattcaatgagtaatcaactaacattgcacgcatttctttttcttctaatacgttaatatcagaaattttctttttatagacacctaatgcataattagtagcgtctgctaatgtttggaaattgaaacgtgtgtcattgttatttaatgtaaatttttgtttcttcacaataccactaccatataacttagtagccatacgtggatagttacgtttcaacattagttcttcatttttagataagtccatgttaataggtactgtatccataattacatattcttcactgtattgacctataaagtcctgctctttagctaaccaattaaaacggttacctaatgcaatatcgattaataacgtttcattaatcttagggaataaaaatttatttacaaatgtttcaaacattgtattagaattatcccacttatcgccaaacgtccatgattttgaataagtatgattaaagtcttgtaatgcagatttagctgactttgcaactaatagtgctgtttcgttttttgtactcttttctgccatgatttattattcctcctcaacatcgccagtaaatgactgttttgaaagtgaatgaatttgtacaccataactatcttcacttttatttgtatcaattgacatattttcatttaattctgttcgtttatttaatcttgaatcttcatatgatgtacccatcatagaacgcatgttgttaccctcgtacatgtttaagttcctcctaatctaaatctaatttatcgacaagttcttcatctgaatagtctttatcattgttatctgtttcttttgattctggttgtggttgtggttgtggttgtggttgttgcatttgtgatgtttcaaaattagtaaatcgttgttctaatgaagcgatacgttgttctaaaacaactgggtctaattttgcacaatcttcatctgttgtagtaggttctaatttgttttcattttcttcttcgattgtttctactgttttatcttcagttgattcttcagttgattcttcagttgattctgaagtttcttcagttgattctgaagtttcttctttgtcgtctggttttacgatttcatcaaattctgtcattttgacacctccaaatattttataactaattatatcatagaatatttaaataagtaaattaaatttattttattttcaaatcataactttgaataaaagtcaatagatacataaattttgtatttaatgaatatgtaataggttagataagttggaaaagtagacgcacagtttttataagtttagtaaagaaatgatatgttaatttataagttttgatttgtataatcgtttattttaaacggtggggaggtg

SEQ ID NO: 120 - DNA, 18040 bp, Rosenblumvirus sp.
  source 1..18040: mol_type = genomic DNA
gggaaaaagtttttgtaaaattacacctccccaccgtttaaaataaacgattatacaaatcaaaacttataaattcacttatcatttctttactaaacttataaaaactgtacgtctacttttccaacttatctaacctataacatattcatcaaatacaaaatttatgtatctattgacttttatcaaaatttatgatttgaacttaaaataattttaatttacttatttaaatattctatgatataataagatataaaatatttggaggtgtgtattaatgactgaatttgaagaaattataaaacctgacgagaaagaagattcttcagaatcaactgaagaatcaactgaagaatcaacagaagaaactgaagaatcgtctgaaagtgaatcagtagaaacaattgaagaagaaaatgaaaacaaattagaacctactattactgatgaagatagtgcaaaattagaccctgttgttttagaacaacgtatcgcttcattagaacaacgatttactaattttgaaacatcacaaatgcaacaaccacaaccacaaccacaaccacaaccagatgttactgaagcagatgacaacgacaaagattattcagatgaagaattagtggataagttagatttagattaggaggaatttaaacatgtatgagggtaacaatatgcgttctatgatgggcacatcatatgaagattcaagattaaataaacgaacagaattaaatgaaaatatgtcaattgatacaaacaaaagtgaagatagttatggtgtacaaattcattcactttcaaaacagtcattcactggcgatgtagaggaggaataataaatcatggcagaaaagagtacaaaaaacgaaacagcactattagttgcacagtcagctaaatctgcattacaagactttaatcatacttattcaaaatcatggacgtttggcgataagtgggataattctaatacaatgtttgaaacatttgtaaataaatttttattccctaagattaatgaaacgttattaatcgatattgcattaggtaatcgttttaattggttagctaaagagcaggactttattggtcaatacagtgaagaatatgtaattatggacacagtacctattaacatggatttatctaaaaatgaagaattaatgttaaaacgtaattatccacgtatggctactaagttatatggtagtggtattgtgaagaaacaaaaattcacattaaataacaatgatacacgctttaatttccaaacattagcagacgcaactaattatgcattaggtgtctataaaaagaaaatttctgatattaacgtattagaagaaaaagaaatgcgtgcaatgttagttgattattcattgaatcaattatctgaatcaaatgtacgtaaagcaacatcaaaagaagatttagcaagtaaagtttttgaagctattcttaacttacaaaacaacagtgctaaatataatgaagttcatcgtgcttcaggtggcgctattggacaatatacaacagtttcaaaattaaaagatattgttatattaacgactgatagcttaaaatcttatcttttagatacaaagattgcgaacacgttccaagtagcagggattgactttacagaccacgttattagttttgatgatttaggtggagtttttaaagttactaaagatattgtcgtatcaagtgacgaatcagttaatttcttacgtgcttacggtgattatcaaactcataaaggtgatacaattccagttggttcagtattcacttatgatgtttcaaatttatctgaatttaagtctaacgttgaagaaattaaaccaaaatcagatttatacgcttttattttggatattaattcaattaaatataaacgttacacaaaaggaatgttaaaacaaccattctataatggtgaatttgatgaagttacacactggattcattactattcatttaaagccattagcccattctttaacaaaattttaattactgaccaagatgtaacaccgagaacagaataatagaggtgatataaatgactaaacataataaaggcgtacaggttgaattatctaaagaaatcaataaacgtgttgtagaacatcgcaacagatttaaacgtcttatgtttaatcgttatttggaatttttacccctattaataaactataccaatcgtgatacggttggtatagattttattcaattagaatctgcattaaggcaaaacattaatgttgttgttggtaaagcaagaaatgaacaaattatgattttgggctatgttaacaacacttattttaatcaagccccaaacttttcatcaaatttcaattttcaatttcaaaaacgattaacaaaagatgatatttatttcattgttccagactatttaataccagatgaatgcttacagattcataaaatatatgataactgtatgagtggtaattttgttgtaatgcaaaataaaccaattcaatataatagtgatatagaaattatagaacattatactgatgaattatctgaggttgttttatctagattctcattaattatgcaagcaaaatttagcaaaatatttaaatcagacattaatgatgagtcagttaatcaacttgtatcggaaatatacaacggtgcaccatttgttaaaatgtcacctatgtttaacgccgatgatgatatcatagatttaaccagtaatagtgtgattccagcactaactgagatgaaacgtgaataccaaaataaaattagtgaattaagtaactatttaggtattaattcactagcagtggataaggaaagcggtgtttctgacgaagaggcaaaaagcaaccgaggttttaccacatcaaatagtaatatttatttaaaaggtcgtgaacctattacattcttatcaaaacgatatggtttagatattaaaccgtattacgacgatgaagttacatcagaaatcacaatgatagatacattgtctaatgatgaaagtagtgaatacaatggctagatatacaatgactttatttgattttattaaatcagaattaattaaaaaaggttttaatgaatttgtaaataatgataaattaacgttttatgatgatgaatttcaattcatgcaaaaaatgttgaagtttgacaaagacgttttagccatcgttaatgaaaaagtgtttaaaggttttaaacttaaagatgacttatctgacttactttttaaaaaatcatttacaatacactttttagatagagaaatcaacagacaaacagttgaagcttttggcatgcaagtgattactgtatgtatcacacatgaggattatttgaatgtggtttattcatcaagtgaagtagaaaaatatcttcaatcacaaggcttcacagaacacaacgaagatacaataagcaacactgatgaaacttcaaatcaaaatgcaacatctttagacaattcaactggcatgacagcaaacagaaatgcttatgtgtcattaccacaaagcgaggttaacatagatgtagataacacaacgttacgatttgcagataataatacaattgacaacggtaaaactgtgaataaatcaagtaacgaaagtaatcaaaacgcaaaacgtaatcaaaatcaaaaaggtaatgcgaaaggtacacaattttcaaaacagtatttaattgataatattgataaagtatacgatttaagaaagaaaattttaaatgaatttgataaaaaatgttttttacaaatttggtaaaggtggaaaattatggcatataatgaaaacgattttaaatattttgacgacattcgtccatttttagacgaaatatataaaacgagagaacgttacacaccgttttacgatgatagagcagattataataccaattcaaaatcatattatgattatatttcaagattatcaaagctcattgaagtattagcacatcgtatttgggactatgacggtgagttaaaaaaacgttttagaaactgggacgatttaatgaaagcattcccagaccaagcgaaagacttatttagaggttggttaaacgacggtacaatagataaaattattcatgatgaatttactaaatatagtactggtcttacatctgcatttgcattatttaaagttgcagaaatgaaacaaatgaatgattttaaagcagaagttaaagacttaattaaagacattgaccgttttgttaatggttttgaattaaatgagcttgaaccaaagtttgttatgggattcggtggtattcgtaatgctgttaaccaatctataaacatagataaagaaacgaatcaaatgtactctacacaatcagattcacaaaacccagaaggtttttggattaataaattaacgcctagcggtgacttaatttctagtatgcgtattgtacaaggtggtcacggtactacaataggtttagaaagacaatctaacggtgaaatgaaaatatggttacatcatgacggtgtagcaaaactgttacaagtcgcatataaagataattatattttagatttagaagaggctaaagggttaacagattatacaccacagtcacttttaaacaaacacacgtttacaccgttaattgatgaagaaaatgacaaaatcgttttaagattcggtgacgggacaatacaggtacgttcaagagctgacgtaaaaaatcacattgataatgtagaaaaagaaatgacgattgataattcagaaaacaatgataatcgatggatgcaagggattgccgttgatggtgatgatttatactggttaagtggtaacagttcagttaattcacacgttcaaattggtaaatattcattaacaactggtcaaaagatttatgattatccgtttaaattatcatatcaagacggtattaattttccacgtgataactttaaagagccggagggtatttgtatttataccaatccaaaaacaaaacgtaaatcgttattacttgctatgactaatggcggtggtggaaaacgattcaataatttatatgggttctttcaacttggtgagtatgaacactttgaagcattacgtgcgagaggttcacaaaactataaattaacaaaagacgatggacgtgcgttatcaattccagaccatattgacgacttaaatgacttaacacaagcagggttctattatattgacggtggtacagctagtaaacttaaaaatatgccaatgaatggtagtaaaaaaattatagacgctggttgtttcatcaatgtataccctacaacacaaacattaggtacagtacaagaattaacgcgtttttctactggtcgaaaaatggttaaaatcatgcgtggtatgacgctcgatgtatttacattaaaatgggattatggtttatggacaacaatcaaaacagacgcaccatatcaagagtatttagaagcaagtcaatacaataactggatagcttacgttacgacacctggtgaatattatattactggtaaccaaatggaattgtttagagacgcaccagaagaaattaaaaaagtgggtgcatggttacgtgtttcaagtggtaacgctgtcggtgaagtaagacaaacattagaggctaatgtgtccgaacataaagaattctttagtaacgttaatgcagatacaaaaaaacgtcaatatagttgggtcaagaaaggataatgtttcatgaaatcacaacaacaagcaaaagaatggatatataagcatgagggtgttggagttgactttgatggagtatatggttttcaatgtatggacttagcagttgcttatgtttattacattactgacggtaaagttcgcatgtggggtaatgccaaagacgccattaacaacgactttaaaggtttagcagcggtgtatgaaaatacacctagctttaaacctcaattatgtgacgttgctgtatacactaattctcaatatgggcatattcaatgtgtaacaagtggaaatcttgattattatacatgcttagaacaaaactggttaaatggtggatatgatggttgggaaaaagcaacaataagaacacattattatgacggtgttacgcattttattcgtccaaaattttcaaatagtgatagtaaagtattagaaaaaaatattcaacaaactaacaactggaaacaaaaccaatacggcacatattacagaaatgaaaatgctacatttacatgtggttttttaccaatatttgctcgtgtcggtagtccgaaattatctgagcttaatggctattggttccaaccaaacggctatacaccatatgacgaagtttgtttatcagacgggtatgtatggattggttacaattgggaaggtacacgttattatttaccagtgagacaatggaacggtaaaacaggtaatagttacagtgttggtattccttggggggtgttctcataatgggtattttaggttttttctttgagtttagttggaaacgatacaaataagaggtgtgaacaatggctgatagaatcgtaagaagtttaagacaagttgaaacaatagacaggttagcagattttttaacagaagaaaatgacttaatcagtacatcagacggacatatttatgtccgtactgatactggttattataaattaacattttataatgatttaaaaacattgattaataaatacagtggtcaaatagaaaatcatgatattgcaattaatgataataaagagaaaatatcaacatttctagagaaaataaaaaaattccaaccaatgattgatagtaataaaaaagagattgattcattaaaagaaaaagatgtcatattaaatgaaagtttagaacaacatcaaacacaattaaatgaatttgaaaaatcaatgttacagtatgatgataaatatgaaacacttacacaatcgttaaacgctactaaagatagtgtaggacgaaacacaaatgaaattaatttaattaaagctaatactggtgcagaaaacattgacgcgttaaaaagagaattagctgaagttaaaaaaagtatcaatcttgataaaataaaagatattgaacaacagattgaattattaaaatctaaacaaaacaatgacaacacaattcaagaaatacaagaggatattaataagttaaaacaaaattcaagtgctgggaaacttgaaagtttagaacaaaccattaatgacatcaaagcaaatgccaaccttgataagataaaagagttagaaacaaaattaaacagtattaaccaaaaagattatacacaggatattaattcaattaaatctgacatcgctgctttaaaaacaaataatgataaaatatcaaaaattgaaaaagatattcaagaattaaaagatagaccagttgttgacggaaacggacatattgatttatcaaaatatgataatgatattaatgatttaaaacaaaaaacatcaacaaatgaatcaagtattaacactttatcaacaagagtggacaacttaaatatagatactaaaattgcacaatctaaatcagaaattgaacaaaattttgatcaaaaaatcaacagtgcaaaattacaatttaatgatacaggttggcaagatatattgctagaaagtggtatagttgcaagtgatagcaacggtggttatcccgcaccgcaatatcgtattgtaacaattaatggtgttaaaaccatacaattaaaaggggtattaaaagggattaagaaaaacggtgatattaaattaggtacgattaacgctaacttaaaatcaacacatcactacacacaaagtgcgattgattcgaaaatgattaatacaagattatatttaaactttaataatgaattacattttgttacatcaaattatagcgatagtgacttaacaaatggagataaacgttttgcaatagatacacaaatcattgaataaaaatgttataatagtcgtataaattatttatacgactattttttatggaggtaaaaatgagaaaattaacaaattttaaatttttctataacacaccgtttacagactatcaaaatacaattcattttaatagtaataaagagcgtgatgattattttttaaacggtcgtcattttaaatcattagactattccaaacaaccgtataattttatacgtgatagaatggaaatcaatgttgatatgcagtggcatgacgcacaagggattaactacatgacgtttttatcagattttgaggacagacgctattacgcttttgtgaatcaaatcgaatatgtgaatgatgttgtggtaaaaatatattttgtgattgatactattatgacgtatacacaaggtaatgtattagaacaactttcaaacgttaatattgaacgtcaacacttatcaaagcgtacgtataactatatgttgccgatgttacgtaacaatgatgatgtgttaaaagtatcaaataaaaactatgtgtataaccaaatgcaacagtatttggaaaatttagtgttattccagtcaagcgctgatttatcaaagaaatttggtacgaaaaaagagccaaacttagatacgtctaaaggtacgatatatgacaatatcacatcgccagtcaacttatacgttatggaatatggtgactttattaactttatggataaaatgagtgcatatccatggattacacaaaactttcaaaaggttcaaatgttacctaaagattttattaatacaaaagatttagaggacgttaagacaagtgaaaaaattactggattaaagacattaaaacagggtggaaaatcaaaagaatggagtttaaacgatttatcattaagtttcacaaagcttcaagagatgatgttgtctaaaaaagacgagtttaaacatatgatacgtaatgagtacatgacgattgaattttatgactggaacggtaacacaatgttacttgacgctggtaaaatttcacaaaaaacaggtgttaagttacgtacaaaatccatcattggttatcataatgaagtgcgagtatatccagttgattataacagtgctgaaaacgatagaccgatacttgctaaaaataaagatatattaattgatacaggttcattcttaaataccaatataacatttaatagttttgcgcaagtgcctatattaattaataacggaattttaggacaatcacaacaagccaatagacagcgtaatgcagaaagtcaattaatcacaagtcgtatagataatgtattaaatggtagtgacccaaaatcacgtttttatgacgctgtaagtgtagcaagtaatttaagtccgactgctttatttggtaagtttaatgaagaatataatttctacaaacaacaacaagcagaatataaagatttagcattacaaccaccgtcagtgacagagtcggaaatgggcaacgcattccaaattgcaaacagtattaacggtttaacgatgaaaattagtgtaccgtcacctaaagaaattacatttttacaaaaatattatatgttgtttggttttgaagtgaatgactataattcatttattgaaccaattaacagtatgactgtttgcaactatttaaaatgtacaggtacgtataccatacgtgacattgaccccatgttaatggaacaattaaaagcaattttagaatctggtgtgagattttggcataatgacggttcaggtaatccaatgttacagaacccgttaaataataaatttagagaaggtgtataaaatgaatgaggtaaaattaagatttacggacacagaagcatttcatatgttcatatatgcaggtgatttaaagttactatattttttatttgttttgatgattatagatgttgttactggttttgctaaagcaattaaaaataataatctatggtctaaaaaatcaatgaaaggttttgctaaaaaattattgatattctgtattatcattttagctaacatcattgaccagattttacaattaaaaggtggcttactcatgattacgattttctattatatcgctaatgagggcttatctatcgtagaaaattgtgcagaaatggacgtattagtaccagaacaaattaaagataaattaagagtaattaaaaacgattctgaaaagggtgataataatgaacgaccaagagaagatagataaatttacgcattcgtatattaatgatgatttcggtttaacgatagaccagttagtccctaaagtaaaagggtatggacgctttaatgtatggctaggtggtaatgaaagtaaaatcagacaagtattaaaagcagtaaaagagataggtgtgtcacctactctttttgctgtatatgaaaaaaatgaagggtatagcgcgggtttaggttggttgaaccatacatctgcacgaggtgactatttaacagacgctaaattcattgcaagaaaattagtatcacaatcaaaacaagcaggacaaccgtcttggtatgattacggtaatccagtgcattttgtaccgcaagacgtacaaagaaaaggtaatgcagattttgctaaaaatatgaaagcaggtacaatcggacgtgcgtatattccattaacagcagcggctacttgggcggcatattatcccctaggtttgaaagcgtcatataataaagtacaaaactatggtaatccttttttagacggtgcgaatactattcttgcgtggggtggtaaattagacggtaaaggtggttcacctagtgattcgtctgacagtggtagtagtggtgacagtggtagttcactgctcgctttagcaaaacaagccatgcaagaattattaaaaaaagtacaagacgcattacaatgggatgtacacagtataggtagcgacaaattttttagtaatgattattttacattacaaaaaacatttaacaacacatatcatattaaaatgacgattgggctactcgattcattaaaaaaactgattgatagcgtgcaagtagatagtgggggtagtagttcaaaccctactgatgatgacggagaccataaaccaattagtggtaaatcagtcaaacctaatggtaaaagtggtcgcgtcattggtggtaactggacatacgcacagttaccagaaaaatataaaaaagcaattggtgtacctttattcaaaaaagaatatttatacaaaccaggtaacatatttcctcaaacgggtaatgcaggtcagtgtacagaattaacatgggcgtatatgtcacaattacatggtaaaagacaaccgacagacgacggtcaagtgacaaacggtcaacgtgtatggtacgtctataaaaagttaggtgcaaaaacaacacacaaccctactgttggttatggtttttcaagtaaaccaccatacttacaagcaacagcatatggcattggtcacacaggtgtcgttgtagcagtatttgacgatggttcattcttagtagcaaactataacgtaccaccatacgtcgcaccgtcacgggttgtattatatacattgattaatggtgtacctcataacgctggtgataatattgtattcttcagtggtattgcttaattaactatgctataatgaacacatgctagtaatgctagtaaataaaatacaaaacataatcaattttcgtacacatttttcatgttatctcaaaagaaaaaggcaactgttatttaacagttgcctttttttaattcatcatgttcgcgttttaatatatgcaaatcagatttgttatgaactgaacgttcaacaggaaataagtcgttaagtgaaaacgaaccaatgtcactttcaatataaagaatatcatcaaattgactatggtcaaaattttctctagcgtcttttaatataaattcacgtttcatattaagttcatcagaaaaatattcatcatatacattaccacatacaatttctgttttagacggataaatcgatattgtaccctgttcattatagatacttttattgttttctataatcgcaccgtcaaagaattgttcacgtacaaaggtttcaaaatcgacgcttgtatcaaaggcgcttttaggtataccagcagaagcaattttaatctttccattcacttcatatgcatattttttatgattcagtacaaacatcttatctatctgttcgttttcaatatcccatttacctaaggctatcgggtcgaataaactggggttcaataagggtttaacaacggatttcatatacaaactatcagtatcacaataaataaaattgtcgtcaatttcactttccgttaagtattggaatggtactaataagttatacaatgaacgtgatgttacaaatgtagaaaataaaatattacgttctgtgtttttgtaaccgttaataatattgtatagttcattgttatcatctaaacggaataagttaaaatgtgaacgtaatgcaggtatgccatataatccgttaagtacaactttagacaacataacctcctcatttgagtaagggtgttcgttgatgtcatcagtaatatgatagtcgtaaggtgatgtcatgttgattttgttttttaacttaccttgtgttttaataaaatagttttgaaatataatatcacgtgcatgaaagtattcacattcatatatcacaaacgaattaacacgtatatgcgtgcaatcaatacccgtaatgtcttgaattattcttaatgtatttgtattaatattaacgtaatcattatcattattatagtattttacaatcatttgacgtaatacacgtgatttgattttaattaataaatcattgttaaatacatctttatcaatcttatataatgaaaaataattgtcatcatctaaaaaagtagggattaatgtaggttctgaataatgttcataaaagtataaccatgtcggaattttctcatgatacatcacataaggataactggaattgatatcaatagaaaaacaaggctcatcaataagtttgtttatgtatttagtgttatacatatttaaaccaccacgataaaatgatttgatatagtcataaaaattcatatcatggaaatggtaatgtgtatatgatattttaatatcttgatattgattgagtaactgaaaacgcgtcatttgattatttaaatacgattccataatattcaatgaaaatgttaatttgttatagtcaaaatttggaaatatatcactataatgaatatggcacatacctaatataatcacgtcattatgaatgtatgtaagttgttcaggtgtgagtttagcaaaacacttaacagcatagtcataggcttcactatctgacatatcgttatctttatcaaatatcgtgtaattaaaatctgttttaagttggtcgtctgttaaataaccaccgtcaagcaactttttacctaatgttgcaattgatgtattggttttcataaagttatcaataatattaaatttaaatccatttaaaaacattgttaagtctaaattaatagacgatttcacacgtttttctaaaatcacattttgatttttagctaaaatagtagcctcttgcatctttagtgtgtgttcgttttcttctgcagattttaaatatatattttcgcgtgtgatattatcaaaataacgcatggtatctttaagtaaaaaatggttgtcatacttattacagttatgtgcaatcatgataatatctgtttttgacttagtgattgtatcacgtcgtttcacatacgtataaaatgcgtcataaaacgattcaaaactaggaaatacttctacatcaatctcataaccattaaaccaaccaattgctactgaatacgttacgtttttatatttggttggtttttttcgtccgttaactttattgtacgctaatgtttctatatcccagtataaaatcattcgacgttcatgtttatgatattgcatgcattctagtaatcccataatcttacacaccttttataagccgtattgtttcattaaatacttctttgtattttcaatatagttatcttcatatattttttcttttctttcaaattcactcatatttttcttcatttcattttttatatgaaattttataattttattcatatctaaatataaatatctatcattatcaacaacgtaattttttgagtaagcgttatcaaaatgtaaattgcttggattgtaataataacgctccatgttttctttataaaacatatcttctcttaaataaataacattgtcatctatatctttgattttagtacaaaattcatattgttttgtataaggtataacaataatattagcattaaatgtatcaacattatacataatttttatatatttatcgtcagttttaatatagaaaaaatcaccgttttgattgatatgatttcttaaattatcatctgccaaattatattcgttaaattcaaactcgccagtagtcatagcgtcatcgtttgaattgaatgcccgtgtgttacgcttttcatttacgtaatcgtttcttcgcatttctaaaaaaatatttttgtaaagtcgtgatgtgttcattttatgtttttgtaataagttatatatatttaaattggataatataggacttgaaaagttgacagcattacctagtaaaaacattttagggaagccgatataatcaacattaccatggttacggtcgattgattcataaattgtttttaacttatcccactcgtcaattaaatagtcatcttcaagtgctaaaaattcatcatatataatgatagggtagtgttttaaaaagttagaatgatattttaaatcagttgcactattcaaatctgtaatcacaccgatttccttatcttgatagatgatagctaaatagtccctagcgcttctgaatgtgacacgcttagatttgaatagtgggtttttgtctatgatttcctcaataaaatcacgataagcgtcacgtaatgtataatgacgtgataataaagtaaatttaatatcaagttttatagctaaataaataaagaatgaaacatagttgaacgattttccgtcagaacggtttgaaatagatatgtaatagtctatatcatcattcatgagttcatcaactaattctatttgattatagttatctggtattttttttctgacatgattgacagcattttgataatctcttaccatgtctaaacgattttgtttcaccatgtatttgctccttataatagtttatgatgtcgtttacagtattaaaattagtcttcaaatgttgcataatataaaaagttatacctcacatcttcatcatcaatagtagtcactggtctgtctgatttaccaatttctttgtataaagtgtcaatttctttaatatatttatacatagaagaattattatttttagcttgtaattcatataaagcatatttatgttttttagcgtttttattattagattcatctttacggttatatatttcaagtatatagtttaattgttcatgtcttttacctcttaccaatgatacagcatttacatatgacacgtttctttcttttggaaaatagggcaaatgtgcgaaatgtttccatgcgtctatgtacgcctcttgtaaatctttatcatcaaatttaaaattaacagtactaaaatcatttaaaaacaattctttttcctgctcttttcttgcgtctctttcttttttccatttatccatttcggacgtatgtctaaccattgctaacgacctccatataacccatatataaccactaaaaagataatgtagaatataatcaatgtagtaaataaaacaccaaatgacacacgtatatgcattgtcataagtattacaagtgtaattaaaaatgctaaaaggaaaacaatagctatgtttaatatattagtcatgttctatcacgttcccgttattatatatcactttgttttgaaaaattattgttatattactttctattggtttctcgaaatattctaatacgtcatcaatagtacaatccataaaaacttcttttttatataatgggtttaaatgttctcgataaaaaacctcaagacaactaaaactatatgtacgaacatcaacgtcaatgtctaaagtaaataaatcattgtattttgtatcactatcatagtattcaatagaaatttcaccgtatctaacaaaaacaacacattttccacttagtgattcaaattttgttattttattcataaaacaatctctattatctaaaatataattaattaatttttttgtgtttaatattgttgtaatattcatttttatatctccttaatgtattttacacaaagattataagcaccttttttataaaagtttgcatcaaaataactatatattaccttagctttatttattttttcgaattgttcaatttcatgttcatatgtttcattaattgatacattgtataataatacggcagtgtatattttttccattgtttagcacctcataaaaataggggataaatatcccctatgaaattgtattaaaatgatacttgaccaaagttgattgaataacctttttgaccttttttattttcatactcataaattgtgaattgaacttcaccagcattgataatgttaacaacgtcctcgtcttgacgcatgtctttaattaattcagttaagtgattcggtaagtttacgttatagtcgtcagtgacgataacaccttgtacaccgaattttgattctttgtttgtgaataatgctctaacgatatactcttttttcataccgtatttttctactaattctgatagtttgataaattctctttctttttcctcaaattcgaatctcgctaatgtgttttggtgtcttgataaaatatcttttacgtttgtcatttttatttctcctcttatttaaattatttgctttctgcaattgcaatttgtagtaaatcattgtaataaacttgcatagttttagtatgtcgtgtagtggataaaagtttgtgtgtattaggtaataagtctttagcttgtgattttgataaatgatactcgtgaagtgggataaattcttcaacatattcatttttatcatctaaataatgaagaatataaccttttattcgtaatgtaacaatatcatcaggtttcattattatatcactcctttctaaaaaacgtaaacgttatacgtttcataaaatcctttgtgcatattccattgttctattgggtcatcaccagcaatgtaagataaaatagattctggtttagtttcgttgtttagttcatcatttaagaatttaacaacagaactattatagtttaataatagttgttggcaagctgatactaaattaatagcattgtcgaaagtataagctggattccattgaatcaacttattgaatagttgcaacatttcagtataggcttgccctttttcttcaggtgcgttatcaacattaaccattattatcactccttaaatcattgatttcattccttatttcatcaacgatttttttaagtgaattatggtctaattgttcaaaatcatccttttcaagtacaaataatgttaattcataagttgatgtattacccataacaataactatattaccattttttaaaatgtaagtttgtaaaggttgtacattttccatttgttacctccttgatttgattacatacatagtatagcaaacgtttaaaagttttgtcaatggtttttcttaaaaaagtttaaataatttaaaaatactatttaatagaagaaattagattttaaatacaaatcataaattttgataaaagtcaatagatacataaattttgtatttgatgaatatgttataggttagataagttggaaaagtagacgtacag

SEQ ID NO: 121 - DNA, 18113 bp, Rosenblumvirus sp.
  source 1..18113: mol_type = genomic DNA
aaattacacctccccaccgtttaaaataaacgattatacaaatcaaaacttataaattcacttatcatttctttactaaacttataaaaactgtacgtctacttttccaacttatctaacctataacatattcatcaaatacaaaatttatgtatctattgacttttatcaaaatttatgatttgtatttaaaatctaatttcttctattaaatagtatttttaaattatttaaacttttttaagaaaaaccattgacaaaacttttaaacgtttgctatactatgtatgtaatcaaatcaaggaggtaacaaatggaaaatgtacaacctttacaaacttacattttaaaaaatggtaatatagttattgttatgggtaatacatcaacttatgaattaacattatttgtacttgaaaaggatgattttgaacaattagaccataattcacttaaaaaaatcgttgatgaaataaggaatgaaatcaatgatttaaggagtgataataatggttaatgttgataacgcacctgaagaaaaagggcaagcctatactgaaatgttgcaactattcaataagttgattcaatggaatccagcttatactttcgacaatgctattaatttagtatcagcttgccaacaactattattaaactataatagttctgttgttaaattcttaaatgatgaactaaacaacgaaactaaaccagaatctattttatcttacattgctggtgatgacccaatagaacaatggaatatgcacaaaggattttatgaaacgtataacgtttacgttttttagaaaggagtgatataataatgaaacctgatgatattgttacattacgaataaaaggttatattcttcattatttagatgataaaaatgaatatgttgaagaatttatcccacttcacgagtatcatttatcaaaatcacaagctaaagacttattacctaatacacacaaacttttatccactacacgacatactaaaactatgcaagtttattacaatgatttactacaaattgcaattgcagaaagcaaataatttaaataagaggagaaataaaaatgacaaacgtaaaagatattttatcaagacaccaaaacacattagcgagattcgaatttgaggaaaaagaaagagaatttatcaaactatcagaattagtagaaaaatacggtatgaaaaaagagtatatcgttagagcattattcacaaacaaagaatcaaaattcggtgtacaaggtgttatcgtcactgacgactataacgtaaacttaccgaatcacttaactgaattaattaaagacatgcgtcaagacgaggacgttgttaacattatcaatgctggtgaagttcaattcacaatttatgagtatgaaaataaaaaaggtcaaaaaggttattcaatcaactttggtcaagtatcattttaatacaatttcataggggatatttatcccctatttttatgaggtgctaaacaatggaaaaaatatacactgccgtattattatacaatgtatcaattaatgaaacatatgaacatgaaattgaacaattcgaaaaaataaataaagctaaggtaatatatagttattttgatgcaaacttttataaaaaaggtgcttataatctttgtgtaaaatacattaaggagatataaaaatgaatattacaacaatattaaacacaaaaaaattaattaattatattttagataatagagattgttttatgaataaaataacaaaatttgaatcactaagtggaaaatgtgttgtttttgttagatacggtgaaatttctattgaatactatgatagtgatacaaaatacaatgatttatttactttagacattgacgttgatgttcgtacatatagttttagttgtcttgaggttttttatcgagaacatttaaacccattatataaaaaagaagtttttatggattgtactattgatgacgtattagaatatttcgagaaaccaatagaaagtaatataacaataatttttcaaaacaaagtgatatataataacgggaacgtgatagaacatgactaatatattaaacatagctattgttttccttttagcatttttaattacacttgtaatacttatgacaatgcatatacgtgtgtcatttggtgttttatttactacattgattatattctacattatctttttagtggttatatatgggttatatggaggtcgttagcaatggttagacatacgtccgaaatggataaatggaaaaaagaaagagacgcaagaaaagagcaggaaaaagaattgtttttaaatgattttagtactgttaattttaaatttgatgataaagatttacaagaggcgtacatagacgcatggaaacatttcgcacatttgccctattttccaaaagaaagaaacgtgtcatatgtaaatgctgtatcattggtaagaggtaaaagacatgaacaattaaactatatacttgaaatatataaccgtaaagatgaatctaataataaaaacgctaaaaaacataaatatgctttatatgaattacaagctaaaaataataattcttctatgtataaatatattaaagaaattgacactttatacaaagaaattggtaaatcagacagaccagtgactactattgatgatgaagatgtgaggtataactttttatattatgcaacatttgaagactaattttaatactgtaaacgacatcataaactattataaggagcaaatacatggtgaaacaaaatcgtttagacatggtaagagattatcaaaatgctgtcaatcatgtcagaaaaaaaataccagataactataatcaaatagaattagttgatgaactcatgaatgatgatatagactattacatatctatttcaaaccgttctgacggaaaatcgttcaactatgtttcattctttatttatttagctataaaacttgatattaaatttactttattatcacgtcattatacattacgtgacgcttatcgtgattttattgaggaaatcatagacaaaaacccactattcaaatctaagcgtgtcacattcagaagcgctagggactatttagctatcatctatcaagataaggaaatcggtgtgattacagatttgaatagtgcaactgatttaaaatatcattctaactttttaaaacactaccctatcattatatatgatgaatttttagcacttgaagatgactatttaattgacgagtgggataagttaaaaacaatttatgaatcaatcgaccgtaaccatggtaatgttgattatatcggcttccctaaaatgtttttactaggtaatgctgtcaacttttcaagtcctatattatccaatttaaatatatataacttattacaaaaacataaaatgaacacatcacgactttacaaaaatatttttttagaaatgcgaagaaacgattacgtaaatgaaaagcgtaacacacgggcattcaattcaaacgatgacgctatgactactggcgagtttgaatttaacgaatataatttggcagatgataatttaagaaatcatatcaatcaaaacggtgattttttctatattaaaactgacgataaatatataaaaattatgtataatgttgatacatttaatgctaatattattgttataccttatacaaaacaatatgaattttgtactaaaatcaaagatatagatgacaatgttatttatttaagagaagatatgttttataaagaaaacatggagcgttattattacaatccaagcaatttacattttgataacgcttactcaaaaaattacgttgttgataatgatagatatttatatttagatatgaataaaattataaaatttcatataaaaaatgaaatgaagaaaaatatgagtgaatttgaaagaaaagaaaaaatatatgaagataactatattgaaaatacaaagaagtatttaatgaaacaatacggcttataaaaggtgtgtaagattatgggattactagaatgcatgcaatatcataaacatgaacgtcgaatgattttatactgggatatagaaacattagcgtacaataaagttaacggacgaaaaaaaccaaccaaatataaaaacgtaacgtattcagtagcaattggttggtttaatggttatgagattgatgtagaagtatttcctagttttgaatcgttttatgacgcattttatacgtatgtgaaacgacgtgatacaatcactaagtcaaaaacagatattatcatgattgcacataactgtaataagtatgacaaccattttttacttaaagataccatgcgttattttgataatatcacacgcgaaaatatatatttaaaatctgcagaagaaaacgaacacacactaaagatgcaagaggctactattttagctaaaaatcaaaatgtgattttagaaaaacgtgtgaaatcgtctattaatttagacttaacaatgtttttaaatggatttaaatttaatattattgataactttatgaaaaccaatacatcaattgcaacattaggtaaaaagttgcttgacggtggttatttaacagacgaccaacttaaaacagattttaattacacgatatttgataaagataacgatatgtcagatagtgaagcctatgactatgctgttaagtgttttgctaaactcacacctgaacaacttacatacattcataatgacgtgattatattaggtatgtgccatattcattatagtgatatatttccaaattttgactataacaaattaacattttcattgaatattatggaatcgtatttaaataatcaaatgacgcgttttcagttactcaatcaatatcaagatattaaaatatcatatacacattaccatttccatgatatgaatttttatgactatatcaaatcattttatcgtggtggtttaaatatgtataacactaaatacataaacaaacttattgatgagccttgtttttctattgatatcaattccagttatccttatgtgatgtatcatgagaaaattccgacatggttatacttttatgaacattattcagaacctacattaatccctacttttttagatgatgacaattatttttcattatataagattgataaagatgtatttaacaatgatttattaattaaaatcaaatcacgtgtattacgtcaaatgattgtaaaatactataataatgataatgattacgttaatattaatacaaatacattaagaataattcaagacattacgggtattgattgcacgcatatacgtgttaattcgtttgtgatatatgaatgtgaatactttcatgcacgtgatattatatttcaaaactattttattaaaacacaaggtaagttaaaaaacaaaatcaacatgacatcaccttacgactatcatattactgatgacatcaacgaacacccttactcaaatgaggaggttatgttgtctaaagttgtacttaacggattatatggcatacctgcattacgttcacattttaacttattccgtttagatgataacaatgaactatacaatattattaacggttacaaaaacacagaacgtaatattttattttctacatttgtaacatcacgttcattgtataacttattagtaccattccaatacttaacggaaagtgaaattgacgacaattttatttattgtgatactgatagtttgtatatgaaatccgttgttaaacccttattgaaccccagtttattcgacccgatagccttaggtaaatgggatattgaaaacgaacagatagataagatgtttgtactgaatcataaaaaatatgcatatgaagtgaatggaaagattaaaattgcttctgctggtatacctaaaagcgcctttgatacaagcgtcgattttgaaacctttgtacgtgaacaattctttgacggtgcgattatagaaaacaataaaagtatctataatgaacagggtacaatatcgatttatccgtctaaaacagaaattgtatgtggtaatgtatatgatgaatatttttctgatgaacttaatatgaaacgtgaatttatattaaaagacgctagagaaaattttgaccatagtcaatttgatgatattctttatattgaaagtgacattggttcgttttcacttaacgacttatttcctgttgaacgttcagttcataacaaatctgatttgcatatattaaaacgcgaacatgatgaattaaaaaaaggcaactgttaaataacagttgcctttttcttttgagataacatgaaaaatgtgtacgaaaattgattatgttttgtattttatttactagcattactagcatgtgttcattatagcatagttaattaagcaataccactgaagaatacaatattatcaccagcgttatgaggtacaccattaatcaatgtatataatacaacccgtgacggtgcgacgtatggtggtacgttatagtttgctactaagaatgaaccatcgtcaaatactgctacaacgacacctgtgtgaccaatgccatatgctgttgcttgtaagtatggtggtttacttgaaaaaccataaccaacagtagggttgtgtgttgtttttgcacctaactttttatagacgtaccatacacgttgaccgtttgtcacttgaccgtcgtctgtcggttgtcttttaccatgtaattgtgacatatacgcccatgttaattctgtacactgacctgcattacccgtttgaggaaatatgttacctggtttgtataaatattcttttttgaataaaggtacaccaattgcttttttatatttttctggtaactgtgcgtatgtccagttaccaccaatgacgcgaccacttttaccattaggtttgactgatttaccactaattggtttatggtctccgtcatcatcagtagggtttgaactactacccccactatctacttgcacgctatcaatcagtttttttaatgaatcgagtagcccaatcgtcattttaatatgatatgtgttgttaaatgttttttgtaatgtaaaataatcattactaaaaaatttgtcgctacctatactgtgtacatcccattgtaatgcgtcttgtactttttttaataattcttgcatggcttgttttgctaaagcgagcagtgaactaccactgtcaccactactaccactgtcagacgaatcactaggtgaaccacctttaccgtctaatttaccaccccacgcaagaatagtattcgcaccgtctaaaaaaggattaccatagttttgtactttattatatgacgctttcaaacctaggggataatatgccgcccaagtagccgctgctgttaatggaatatacgcacgtccgattgtacctgctttcatatttttagcaaaatctgcattaccttttctttgtacgtcttgcggtacaaaatgcactggattaccgtaatcataccaagacggttgtcctgcttgttttgattgtgatactaattttcttgcaatgaatttagcgtctgttaaatagtcacctcgtgcagatgtatggttcaaccaacctaaacccgcgctatacccttcatttttttcatatacagcaaaaagagtaggtgacacacctatctcttttactgcttttaatacttgtctgattttactttcattaccacctagccatacattaaagcgtccatacccttttactttagggactaactggtctatcgttaaaccgaaatcatcattaatatacgaatgcgtaaatttatctatcttctcttggtcgttcattattatcacccttttcagaatcgtttttaattactcttaatttatctttaatttgttctggtactaatacgtccatttctgcacaattttctacgatagataagccctcattagcgatataatagaaaatcgtaatcatgagtaagccaccttttaattgtaaaatctggtcaatgatgttagctaaaatgataatacagaatatcaataattttttagcaaaacctttcattgattttttagaccatagattattatttttaattgctttagcaaaaccagtaacaacatctataatcatcaaaacaaataaaaaatatagtaactttaaatcacctgcatatatgaacatatgaaatgcttctgtgtccgtaaatcttaattttacctcattcattttatacaccttctctaaatttattatttaacgggttctgtaacattggattacctgaaccgtcattatgccaaaatctcacaccagattctaaaattgcttttaattgttccattaacatggggtcaatgtcacgtatggtatacgtacctgtacattttaaatagttgcaaacagtcatactgttaattggttcaataaatgaattatagtcattcacttcaaaaccaaacaacatataatatttttgtaaaaatgtaatttctttaggtgacggtacactaattttcatcgttaaaccgttaatactgtttgcaatttggaatgcgttgcccatttccgactctgtcactgacggtggttgtaatgctaaatctttatattctgcttgttgttgtttgtagaaattatattcttcattaaacttaccaaataaagcagtcggacttaaattacttgctacacttacagcgtcataaaaacgtgattttgggtcactaccatttaatacattatctatacgacttgtgattaattgactttctgcattacgctgtctattggcttgttgtgattgtcctaaaattccgttattaattaatataggcacttgcgcaaaactattaaatgttatattggtatttaagaatgaacctgtatcaattaatatatctttatttttagcaagtatcggtctatcgttttcagcactgttataatcaactggatatactcgcacttcattatgataaccaatgatggattttgtacgtaacttaacacctgttttttgtgaaattttaccagcgtcaagtaacattgtgttaccgttccagtcataaaattcaatcgtcatgtactcattacgtatcatatgtttaaactcgtcttttttagacaacatcatctcttgaagctttgtgaaacttaatgataaatcgtttaaactccattcttttgattttccaccctgttttaatgtctttaatccagtaattttttcacttgtcttaacgtcctctaaatcttttgtattaataaaatctttaggtaacatttgaaccttttgaaagttttgtgtaatccatggatatgcactcattttatccataaagttaataaagtcaccatattccataacgtataagttgactggcgatgtgatattgtcatatatcgtacctttagacgtatctaagtttggctcttttttcgtaccaaatttctttgataaatcagcgcttgactggaataacactaaattttccaaatactgttgcatttggttatacacatagtttttatttgatacttttaacacatcatcattgttacgtaacatcggcaacatatagttatacgtacgctttgataagtgttgacgttcaatattaacgtttgaaagttgttctaatacattaccttgtgtatacgtcataatagtatcaatcacaaaatatatttttaccacaacatcattcacatattcgatttgattcacaaaagcgtaatagcgtctgtcctcaaaatctgataaaaacgtcatgtagttaatcccttgtgcgtcatgccactgcatatcaacattgatttccattctatcacgtataaaattatacggttgtttggaatagtctaatgatttaaaatgacgaccgtttaaaaaataatcatcacgctctttattactattaaaatgaattgtattttgatagtctgtaaacggtgtgttatagaaaaatttaaaatttgttaattttctcatttttacctccataaaaaatagtcgtataaataatttatacgactattataacatttttattcaatgatttgtgtatctattgcaaaacgtttatctccatttgttaagtcactatcgctataatttgatgtaacaaaatgtaattcattattaaagtttaaatataatcttgtattaatcattttcgaatcaatcgcactttgtgtgtagtgatgtgttgattttaagttagcgttaatcgtacctaatttaatatcaccgtttttcttaatcccttttaataccccttttaattgtatggttttaacaccattaattgttacaatacgatattgcggtgcgggataaccaccgttgctatcacttgcaactataccactttctagcaatatatcttgccaacctgtatcattaaattgtaattttgcactgttgattttttgatcaaaattttgttcaatttctgatttagattgtgcaattttagtatctatatttaagttgtccactcttgttgataaagtgttaatacttgattcatttgttgatgttttttgttttaaatcattaatatcattatcatattttgataaatcaatatgtccgtttccgtcaacaactggtctatcttttaattcttgaatatctttttcaatttttgatattttatcattatttgtttttaaagcagcgatgtcagatttaattgaattaatatcctgtgtataatctttttggttaatactgtttaattttgtttctaactcttttatcttatcaaggttggcatttgctttgatgtcattaatggtttgttctaaactttcaagtttcccagcacttgaattttgttttaacttattaatatcctcttgtatttcttgaattgtgttgtcattgttttgtttagattttaataattcaatctgttgttcaatatcttttattttatcaagattgatactttttttaacttcagctaattctctttttaacgcgtcaatgttttctgcaccagtattagctttaattaaattaatttcatttgtgtttcgtcctacactatctttagtagcgtttaacgattgtgtaagtgtttcatatttatcatcatactgtaacattgatttttcaaattcatttaattgtgtttgatgttgttctaaactttcatttaatatgacatctttttcttttaatgaatcaatctcttttttattactatcaatcattggttggaatttttttattttctctagaaatgttgatattttctctttattatcattaattgcaatatcatgattttctatttgaccactgtatttattaatcaatgtttttaaatcattataaaatgttaatttataataaccagtatcagtacggacataaatatgtccgtctgatgtactgattaagtcattttcttctgttaaaaaatctgctaacctgtctattgtttcaacttgtcttaaacttcttacgattctatcagccattgttcacacctcttatttgtatcgtttccaactaaactcaaagaaaaaacctaaaatacccattatgagaacaccccccaaggaataccaacactgtaactattacctgttttaccgttccattgtctcactggtaaataataacgtgtaccttcccaattgtaaccaatccatacatacccgtctgataaacaaacttcgtcatatggtgtatagccgtttggttggaaccaatagccattaagctcagataatttcggactaccgacacgagcaaatattggtaaaaaaccacatgtaaatgtagcattttcatttctgtaatatgtgccgtattggttttgtttccagttgttagtttgttgaatatttttttctaatactttactatcactatttgaaaattttggacgaataaaatgcgtaacaccgtcataataatgtgttcttattgttgctttttcccaaccatcatatccaccatttaaccagttttgttctaagcatgtataataatcaagatttccacttgttacacattgaatatgcccatattgagaattagtgtatacagcaacgtcacataattgaggtttaaagctaggtgtattttcatacaccgctgctaaacctttaaagtcgttgttaatggcgtctttggcattaccccacatgcgaactttaccgtcagtaatgtaataaacataagcaactgctaagtccatacattgaaaaccatatactccatcaaagtcaactccaacaccctcatgcttatatatccattcttttgcttgttgttgtgatttcatgaaacattatcctttcttgacccaactatattgacgtttttttgtatctgcattaacgttactaaagaattctttatgttcggacacattagcctctaatgtttgtcttacttcaccgacagcgttaccacttgaaacacgtaaccatgcacccacttttttaatttcttctggtgcgtctctaaacaattccatttggttaccagtaatataatattcaccaggtgtcgtaacgtaagctatccagttattgtattgacttgcttctaaatactcttgatatggtgcgtctgttttgattgttgtccataaaccataatcccattttaatgtaaatacatcgagcgtcataccacgcatgattttaaccatttttcgaccagtagaaaaacgcgttaattcttgtactgtacctaatgtttgtgttgtagggtatacattgatgaaacaaccagcgtctataatttttttactaccattcattggcatatttttaagtttactagctgtaccaccgtcaatataatagaaccctgcttgtgttaagtcatttaagtcgtcaatatggtctggaattgataacgcacgtccatcgtcttttgttaatttatagttttgtgaacctctcgcacgtaatgcttcaaagtgttcatactcaccaagttgaaagaacccatataaattattgaatcgttttccaccaccgccattagtcatagcaagtaataacgatttacgttttgtttttggattggtataaatacaaataccctccggctctttaaagttatcacgtggaaaattaataccgtcttgatatgataatttaaacggataatcataaatcttttgaccagttgttaatgaatatttaccaatttgaacgtgtgaattaactgaactgttaccacttaaccagtataaatcatcaccatcaacggcaatcccttgcatccatcgattatcattgttttctgaattatcaatcgtcatttctttttctacattatcaatgtgattttttacgtcagctcttgaacgtacctgtattgtcccgtcaccgaatcttaaaacgattttgtcattttcttcatcaattaacggtgtaaacgtgtgtttgtttaaaagtgactgtggtgtataatctgttaaccctttagcctcttctaaatctaaaatataattatctttatatgcgacttgtaacagttttgctacaccgtcatgatgtaaccatattttcatttcaccgttagattgtctttctaaacctattgtagtaccgtgaccaccttgtacaatacgcatactagaaattaagtcaccgctaggcgttaatttattaatccaaaaaccttctgggttttgtgaatctgattgtgtagagtacatttgattcgtttctttatctatgtttatagattggttaacagcattacgaataccaccgaatcccataacaaactttggttcaagctcatttaattcaaaaccattaacaaaacggtcaatgtctttaattaagtctttaacttctgctttaaaatcattcatttgtttcatttctgcaactttaaataatgcaaatgcagatgtaagaccagtactatatttagtaaattcatcatgaataattttatctattgtaccgtcgtttaaccaacctctaaataagtctttcgcttggtctgggaatgctttcattaaatcgtcccagtttctaaaacgtttttttaactcaccgtcatagtcccaaatacgatgtgctaatacttcaatgagctttgataatcttgaaatataatcataatatgattttgaattggtattataatctgctctatcatcgtaaaacggtgtgtaacgttctctcgttttatatatttcgtctaaaaatggacgaatgtcgtcaaaatatttaaaatcgttttcattatatgccataattttccacctttaccaaatttgtaaaaaacattttttatcaaattcatttaaaattttctttcttaaatcgtatactttatcaatattatcaattaaatactgttttgaaaattgtgtacctttcgcattacctttttgattttgattacgttttgcgttttgattactttcgttacttgatttattcacagttttaccgttgtcaattgtattattatctgcaaatcgtaacgttgtgttatctacatctatgttaacctcgctttgtggtaatgacacataagcatttctgtttgctgtcatgccagttgaattgtctaaagatgttgcattttgatttgaagtttcatcagtgttgcttattgtatcttcgttgtgttctgtgaagccttgtgattgaagatatttttctacttcacttgatgaataaaccacattcaaataatcctcatgtgtgatacatacagtaatcacttgcatgccaaaagcttcaactgtttgtctgttgatttctctatctaaaaagtgtattgtaaatgattttttaaaaagtaagtcagataagtcatctttaagtttaaaacctttaaacactttttcattaacgatggctaaaacgtctttgtcaaacttcaacattttttgcatgaattgaaattcatcatcataaaacgttaatttatcattatttacaaattcattaaaaccttttttaattaattctgatttaataaaatcaaataaagtcattgtatatctagccattgtattcactactttcatcattagacaatgtatctatcattgtgatttctgatgtaacttcatcgtcgtaatacggtttaatatctaaaccatatcgttttgataagaatgtaataggttcacgaccttttaaataaatattactatttgatgtggtaaaacctcggttgctttttgcctcttcgtcagaaacaccgctttccttatccactgctagtgaattaatacctaaatagttacttaattcactaattttattttggtattcacgtttcatctcagttagtgctggaatcacactattactggttaaatctatgatatcatcatcggcgttaaacataggtgacattttaacaaatggtgcaccgttgtatatttccgatacaagttgattaactgactcatcattaatgtctgatttaaatattttgctaaattttgcttgcataattaatgagaatctagataaaacaacctcagataattcatcagtataatgttctataatttctatatcactattatattgaattggtttattttgcattacaacaaaattaccactcatacagttatcatatattttatgaatctgtaagcattcatctggtattaaatagtctggaacaatgaaataaatatcatcttttgttaatcgtttttgaaattgaaaattgaaatttgatgaaaagtttggggcttgattaaaataagtgttgttaacatagcccaaaatcataatttgttcatttcttgctttaccaacaacaacattaatgttttgccttaatgcagattctaattgaataaaatctataccaaccgtatcacgattggtatagtttattaataggggtaaaaattccaaataacgattaaacataagacgtttaaatctgttgcgatgttctacaacacgtttattgatttctttagataattcaacctgtacgcctttattatgtttagtcatttatatcacctctattattctgttctcggtgttacatcttggtcagtaattaaaattttgttaaagaatgggctaatggctttaaatgaatagtaatgaatccagtgtgtaacttcatcaaattcaccattatagaatggttgttttaacattccttttgtgtaacgtttatatttaattgaattaatatccaaaataaaagcgtataaatctgattttggtttaatttcttcaacgttagacttaaattcagataaatttgaaacatcataagtgaatactgaaccaactggaattgtatcacctttatgagtttgataatcaccgtaagcacgtaagaaattaactgattcgtcacttgatacgacaatatctttagtaactttaaaaactccacctaaatcatcaaaactaataacgtggtctgtaaagtcaatccctgctacttggaacgtgttcgcaatctttgtatctaaaagataagattttaagctatcagtcgttaatataacaatatcttttaattttgaaactgttgtatattgtccaatagcgccacctgaagcacgatgaacttcattatatttagcactgttgttttgtaagttaagaatagcttcaaaaactttacttgctaaatcttcttttgatgttgctttacgtacatttgattcagataattgattcaatgaataatcaactaacattgcacgcatttctttttcttctaatacgttaatatcagaaattttctttttatagacacctaatgcataattagttgcgtctgctaatgtttggaaattaaagcgtgtatcattgttatttaatgtgaatttttgtttcttcacaataccactaccatataacttagtagccatacgtggataattacgttttaacattaattcttcatttttagataaatccatgttaataggtactgtgtccataattacatattcttcactgtattgaccaataaagtcctgctctttagctaaccaattaaaacgattacctaatgcaatatcgattaataacgtttcattaatcttagggaataaaaatttatttacaaatgtttcaaacattgtattagaattatcccacttatcgccaaacgtccatgattttgaataagtatgattaaagtcttgtaatgcagatttagctgactgtgcaactaatagtgctgtttcgttttttgtactcttttctgccatgatttattattcctcctctacatcgccagtgaatgactgttttgaaagtgaatgaatttgtacaccataactatcttcacttttgtttgtatcaattgacatattttcatttaattctgttcgtttatttaatcttgaatcttcatatgatgtgcccatcatagaacgcatattgttaccctcatacatgtttaaattcctcctaatctaaatctaacttatccactaattcttcatctgaataatctttgtcgttgtcatctgcttcagtaacatctggttgtggttgtggttgtggttgtggttgttgcatttgtgatgtttcaaaattagtaaatcgttgttctaatgaagcgatacgttgttctaaaacaacagggtctaattttgcactatcttcatcagtaatagtaggttctaatttgttttcattttcttcttcaattgtttctactgattcactttcagacgattcttcagtttcttctgttgattcttcagttgattcttcagttgattctgaagaatcttctttctcgtcaggttttataatttcttcaaattcagtcattaatacacacctccaaatattttatatcttattatatcatagaatatttaaataagtaaattaaaattattttaagttcaaatcataaattttgataaaagtcaatagatacataaattttgtatttgatgaatatgttataggttagataagttggaaaagtagacgtacagtttttataagtttagtaaagaaatgataagtgaatttataagttttgatttgtataatcgtttattttaaacggtggggaggtgtaattt

SEQ ID NO: 122 - DNA, 18335 bp, Rosenblumvirus sp.
  source 1..18335: mol_type = genomic DNA
ggaaaaagtttttgtaaaattacacctccccaccgtttaaaataaacgattatacaaatcaaaacttataaattaacttatcatttctttactaaacttataaaaactgtgcttctacttttccaacttatcaaacctataacatattcataaaatacaaaatatatgtatctattgacttttattcaaaattatgatttgtatttaaaatctaatttcttctattaaatagtatttttaaattatttaaactttttaagaaaaaccattgacaaaacttttaaacgtttgctatactatgtatgtaatcaaatcaaggaggtaacaaaatggaaaatgtacaacctttacaaacttacattttaaaaaatggtaatatagttattgttatgggtaatacatcaacttatgaattaacattatttgtacttgaaaaggacgattttgaacaattagaccataattcacctaaaaaaatcgttgatgaattaaggaatgaaatcaatgatttaaggagtgataataatggttaatgttgataatgcacctgcagaaaaaggtcaagcatatactgaaatgttgcaactattcaataaacttattcaatggaatccagcttatactttcgacaatgcaattaacttagtatcggcttgccaacaactattattaaactataatagttctgttgttcaattcttaaatgatgaactaaacaacgaaactaaaccagaatctattttatcttacattgctggtgatgacccaatagaacaatggaatatgcacaaaggattttatgaaacgtataacgtttacgttttttagaaaggagtgatataataatgaaacctgatgatattgttacattacgaattaaaggttatattcttcactatttagatgataaaaatgaatatgttgaagaatttattccacttcatgagtatcatttatcaaaaacacaagcaaaagatttattacctaattcacacaaacttttatccactacacgcacaacgaaaacaattcaagtttattacaatgatttactacaaatttcaattccagaaagcaaataatttaaataagaggagaaataaaaatgacaaacgtaaaagatattttatcaagacaccaaaacacattagcgagatttgaatttgaggaaaaagaaagagaatttattaaactatcagaattagtagaaaaatacggtatgaaaaaagagtatatcgttagagcattattcacaaacaaagaatcaaaattcggtgaacaaggtgttatcgtcactgacgactataacgtaaacttaccgaatcacttaactgaattaattaaagacatgcgtcaagacgaggacgttgttaacattatcaatgctggtgaagtgcaatttacaatttatgaatatgaaaacaaaaaaggtcaaaaaggttactcaatcaactttggtccagtatcattttaatacaattttataggggatatttatcccctatttttatgaggtgctaaacaatggaaaaaatatacactgccgtattattatacaatgtatcaattaatgaaacatatgaacatgaaattgaacaattcgaaaaaataaataaagttaaggtaatatatagttattttgacgcaaacttttacaaaaaaggtgcatataatctttgtgtaaaatacattaaggagatataaaatgaatattacaacaatattaaacacaaaaaaattaattaattatattttagataatagagattgttttatgaataaaataacaaaatttgaatcactaagtggaaaatgtgttgtttttgttagatacggtgaaatttctattgaatactatgatagtgatacaaaatacaatgatttatttactttagacattgacgttgatgttcgtacatatagttttagttgtcttgaggttttttatcgagaacatttaaacccattatataaaaaagaagtttttatggattgtactattgatgacgtattagaatatttcgagaaaccaatagaaagtaatataacaataatttttcaaaacaaagtgatatataataacgggaacgtgatagaacatgactaatatattaaacatagctattattttccttttagcatttttaattacacttgtaatacttatgacaatgcatatacgtgtgtcatttggtgttttatttactacattgattatattctacattatctttttagtggttatatatgggttatatggaggtcgttagcaatggttagacatacgtccgaaatggataaatggaaaaaagaaagagacgcaagaaaagagcaggaaaaagaattgtttttaaatgattttagtactgttaattttaaatttgatgataaagatttacaagaggcgtacatagacacatggaaacatttcgcacatttgccctattttccaaaagaaagaaacgtgtcatatgcaaatgccgtatcattggtaagaggtaaaagacatgaacaattaaactatatacttgaaatatataaccgtaaagatgaatctaataataaaaacgctaaaaaacataaatatgctttatatgaattacaagctaaaaataataattcttctatgtataaatatattaaagaaattgacactttatacaaagaaattggtaaatcagacagaccagtgactactattgatgataaagatgtgaggtataactttttatattatgcaacatttgaagagtaattttaatactgtaaacgacatcataaactattataaggagcaaaaacatggtgaaacaaaatcgtttagacatggtaagagattatcaaaatgctgtcaatcatgtcagaaaaaaaataccagataactataatcaaatagaattagttgatgaactcatgaatgatgatatagactattacatatctatttcaaaccgttctgacggaaaatcgttcaactatgtttcattctttatttatttagctataaaacttgatattaaatttactttattatcacgtcattatacattacgtgacgcttatcgtgattttattgaggaaatcatagacaaaaacccactattcaaatctaagcgtgtcacattcagaagcgctagggactatttagctatcatctatcaagataaggaaatcggtgtgattacagatttgaatagtgcaactgatttaaaatatcattctaactttttaaaacactaccctatcattatatatgatgaatttttagcacttgaagatgactatttaattgacgagtgggataagttaaaaacaatttatgaatcaatcgaccgtaaccatggtaatgttgattatattggctttcctaaaatgtttttactaggtaatgcagtcaacttttcaagtcctatattatccaatttaaatatatataacttattacaaaaacataaaatgaacacatcacgactttacaaaaacatttttttagaaatgcgaagaaacgattacgtaaatgaaaagcgtaacacacgggcattcaattcaaacgatgacgctatgactactggcgagtttgaatttaacgaatataatttggcagatgataatttaagaaatcatatcaatcaaaacggtgattttttctatattaaaactgacgataaatatataaaaattatgtataatgttgatacatttaatgctaatattattgttataccttatacaaaacaatatgaattttgtactaaaatcaaagatatagatgacaatgttatttatttaagagaagatatgttttataaagaaaacatggagcgttattattacaatccaagcaatttacattttgataacgcttactcaaaaaattacgttgttgataatgatagatatttatatttagatatgaataaaattataaaatttcatataaaaaatgaaatgaagaaaaatatgagtgaatttgaaagaaaagaaaaaatatatgaagataactatattgaaaatacaaagaagtatttaatgaaacaatacggcttataaaaggtgtgtaagattatgggattactagaatgcatgcaatatcataaacatgaacgtcgaatgattttatactgggatatagaaacattagcgtacaataaagttaacggacgaaaaaaaccaaccaaatataaaaacgtaacgtattcagtagcaattggttggtttaatggttatgagattgatgtagaagtatttcctagttttgaatcgttttatgacgcattttatacgtatgtgaaacgacgtgatacaatcactaagtcaaaaacagatattatcatgattgcacataactgtaataagtatgacaaccattttttacttaaagataccatgcgttattttgataatatcacacgtgaaaatatatatttaaaatctgcagaagaaaacgaacacacactaaagatgcaagaggctactattttagctaaaaatcaaaatgtgattttagaaaaacgtgtgaaatcgtctattaatttagacttaacaatgtttttaaatggatttaaatttaatattattgataactttatgaaaacaaatacatcaattgcaacattaggtaaaaagttgcttgacggtggttatttaacagacgaccaacttaaaacagattttaattacacgatatttgataaagataacgacatgtcagatagtgaagcctatgactatgccgtaaagtgttttgctaaactcacacctgaacaacttacatacattcataatgacgttattatattaggtatgtgccatattcattatagtgatatatttccaaattttgactataacaaattaacattttcattgaatattatggaatcgtatttaaataatcaaatgacgcgttttcagttactcaatcaatatcaagatattaaaatatcatatacacattatcatttccatgatatgaatttttatgattatatcaaatcattttatcgtggtggtttaaatatgtataacactaaatacataaacaaacttattgatgagccttgtttttctattgatatcaattccagttatccttatgtgatgtatcatgagaaaattccgacatggttatacttttatgaacattattcagaacctacattaatccctacttttttagatgatgacaattatttttcattatataagattgataaagatgtatttaacaatgatttattaattaaaatcaaatcacgtgtattacgtcaaatgattgtaaaatactataataatgataatgattacgttaatattaatacaaatacattaagaatgattcaagacattacgggtattgattgcacgcatatacgtgttaattcgtttgtgatatatgaatgtgaatactttcatgcacgtgatattatatttcaaaactattttattaaaacacaaggtaagttaaaaaacaaaatcaacatgacatcaccttacgactatcatattactgatgacatcaacgaacacccttactcaaatgaggaggttatgttgtctaaagttgtacttaacggattatatggcatacctgcattacgttcacattttaacttattccgtttagatgataacaacgaactatataatatcattaacggttacaaaaacactgaacgtaatatattattctctacatttgtcacatcacgttcattatataacttattggtacctttccaatacttaactgaaaatgaaattgacgacaattttatttattgcgatactgatagtttgtatatgaaatccgttgttaaacccttattgaaccccagtttattcgacccgatagccttaggtaaatgggatattgaaaacgaacagatagataagatgtttgtactgaatcataaaaaatatgcatatgaagtgaatggaaagattaaaattgcttctgctggtataccgaaaagcgcctttgatacaagcgtcgattttgaaacctttgtacgtgaacaattctttgacggtgtgataatagaaaacaataaaagtatctataacgaacagggtacgatatcgatttatccgtctaaaacagaaattgtatgcggtaatgtatatgatgaatattttactgatgaacttaatatgaaacgtgaatttatcttaaaagacgctagagaaaattttgaccatagtcaatttgatgatattctttatattgaaagtgacatcggttcattctcacttaatgacttatttccagttgtacgttcagtgcataataaatctaatttgcatatattaaaacgtgaacacgatgaattaaaaaaaggcaactgttaaataacagtcgcctttttcttttgatataacatgaaaaatgtgtacgaaaattgattatgttttgtattttatttactagcattactagcatgttttcattatagcatagttaattaagcaataccactgaagaatacaatattatcaccagcgttatgaggtacaccattaatcaatgtatataatacaacccgtgacggtgccacgtatggtgggacgttatagtttgctactaagaatgaaccatcgtcaaatactgctacaacgacacctgtgtgaccaatgccatatgctgttgcttgtaagtatggtggtttacttgaaaaaccataccctactgttggattatgtgttgtttttgcacctaactttttatatacgtaccacacacgttgaccgtttgttatttgaccgtcgtctgttggttgtcttttaccatgtaattgtgacatatatgcccatgttaattctgtacattgtcctgcattacccgtttgaggaaatatgttacctggtttgtacaagtattcttttttgaataaaggtacaccaattgcttttttatatttttctggtaactgtgcatacgtccagttaccaccaatgacgcgtccacttttaccatttggtttgactgacttaccactaattggtttatggtccccgtcatcatcagtagggtttgaactactatccccactatctacttgcacactatcaatcagtttttttaatgaatcaagtagcccaatcgtcattttaatatgatatgtgttgttaaatgttttttgtaatgtaaaataatcattactaaaaaatttatcactaccaatactgtgtacatcccattgtaatgcgtcttgtactttttttaataattcttgcatggcttgttttgctaaagcgagcagtgaactaccactgtcaccactactaccactgtcagacgaatcactaggtgaaccacctttaccgtctaatttaccaccccatgctaaaatagtatttgcaccgtctaaaaaaggattaccatagttttgtactttattatatgacgctttcaaacctaggggataatatgccgcccaagtagccgctgctgttaatggaatatacgcacgtccgattgtacctgctttcatatttttagcaaaatctgcattaccttttctttgtacgtcttgaggtacaaagtgaacgatgttacctgcgtcataccaagacggttgtcctgcttgttttgattgtgatactaattttcttgcaatgaatttagcgtctgttaaatagtcacctcgtgcagatgtatggttcaaccaacctaaaccagcgctatacccttcatttttttcatatacagcaaaaagagtaggtgacacacctatctcttttactgcttttaatacttgtctgattttactttcattaccacctagccatacattaaagcgtccatacccttttactttagggactaactggtctatcgttaaaccgaaatcatcattaatatacgaatgcgtaaatttatctatcttctcttggtcgttcattattatcacccttttcagaatcgtttttaattactcttaatttatctttaatttgttcaggcactaatacgtccatttcagcacaattttcaacaatagatagtccctcatttgcgatataatagaaaatcgtaatcatgagtaaaccaccttttaattgtaaaatctggtcaatgatgttagctaaaatgataatacagaatatcaataattttttagcaaaacctttcattgattttttagaccatagattattatttttaattgctttagcaaaaccagtaacaacatctataatcatcaaaacaaataaaaaatatagtaactttaaatcacctgcatatatgaacatatgaaatgcttctgtgtccgtaaatcttaattttacctcattcattttatacaccttctctaaatttattatttaacgggttctgtaacattggattacctgaaccgtcattatgccaaaatctcacaccagattctaaaattgcttttaattgttccattaacatagggtcaatgtcacgtatggtatacgtacctgtacattttaaatagttgcatacagtcatgctgttaataggttcaatgaatgtattatagtcatttacttcaaaaccaaacaacatataatatttttgtaaaaatgtaatttctttaggtgacggtacactaattttcatcgttaaaccgttaatgctatttgcaatttggaatgcgtttcccatttctgattctgtcacagatggtggttgtaaggctaaatctttatattctgcctgttgttgtttgtagaaattatattcttcattaaacttaccaaataaagcggttggacttaaattacttgctacacttacagcgtcataaaaacgtgattttgggtcactaccatttaatacattatctatacgacttgtgattaattgactttctgcattacgctgtctattggcttgttgtgattgtcctaaaattccgttattaattaatataggcacttgcgcaaaactattaaatgttatattggtatttaagaatgaacctgtatcaattaatatatctttatttttagcaagtatcggtctatcgttttcagcactgttataatcaactggatatactcgcacttcattatgataaccaatgatggattttgtacgtaacttaacacctgttttttgtgaaattttaccagcgtcaagtaacattgtgttaccgttccagtcataaaattcaatcgtcatgtactcattacgtatcatatgtttaaactcgtcttttttagacaacatcatctcttgaagctttgtgaaacttaatgataaatcgtttaaactccattcttttgattttccaccctgttttaatgtctttaatccagtaattttttcacttgtcttaacgtcctctaaatcttttgtattaataaaatctttaggtaacatttgaaccttttgaaagttttgtgtaatccatggatatgcactcattttatccataaagttaataaagtcaccatattccataacgtataagttgactggcgatgtgatattgtcatatatcgtacctttagacgtatctaagtttggctcttttttcgtaccaaatttctttgataaatcagcgcttgactggaataacactaaattttccaaatactgttgcatttggttatacacatagtttttatttgatacttttaacacatcatcattgttacgtaacatcggcaacatatagttatacgtacgctttgataagtgttgacgttcaatattaacgtttgaaagttgttctaatacattaccttgtgtatacgtcataatagtatcaatcacaaaatatatttttaccacaacatcattcacatattcgatttgattcacaaaagcgtaatagcgtctatcctcaaaatctgataaaaacgtcatgtagttaatcccttgtgcgtcatgccactgcatatcaacattgatttccattctatcacgtataaaattatacggttgtttggaatagtctaatgatttaaaatgacgaccgtttaaaaaataatcatcacgctctttattactattaaaatgaattgtattttgatagtctgtaaacggtgtgttatagaaaaatttaaaatttgttaattttctcatttttacctccataaaaaatagtcgtataaataatttatacgactattataacatttttattcaatgatttgtgtatctattgcaaaacgtttatctccatttgttaagtcactatcgctataatttgatgtaacaaaatgtaattcattattaaagtttaaatataatcttgtattcatcattttattatcaatcgcacattgtgtgtagtgatgtgttgattttaagtttgcgttaatcgtacctaatttaatatcaccgtttttcttaatcccttttaataccccttttaattgtatggttttaacaccattaattgttacaatacgatattgcggtgcgggataacccccgttgctatcacttgcaacaataccactttcaagttgcacatcttgccaacctgtatcattaaattgtaattttgcactgttaattttttgatcaaaattttgttcaatttctgatttagattgtgcaattttagtatctatatttaagttatccacttttgttgataaaacgcttatacttgattcgtttgttgatgttttttgttttaaatcactaatatcattatcatattttgataaatcaatatgaccgtttccgtcaacaactggtctgtcttttaattcttgaataactttttcaatttttgatattttatcattatttgtttttaaagtagcgatgtcagatttaattgaattaatatcctgtgtataatctttttggttaatactgtttaattttgtttctaactcttttatcttatcaaggttggtatttgctttgatgtcattaatggtttgttctaaactttcaagtttcccagaacttgaattttgttttaacttattaatatcctcttgtatttcttgaattgtgttgtcattgttttgtttagattttaataattcaatttgactttctatgtcttttattttatcaagattaacactttttttaacttcagctaattctctttttaatgcgtcaatgttttctgcaccagtatttgatttaattatattaatttcatttgtgtttcgtcctacactatctttagtagcgtttaaagattgtgtaagtgtttcatatttatcatcatactttaacattgatttttcaaattcatttaattgtgtttgatgttgttctaaactttcatttaatatgacatttttttcttttaatgaatcaatgtcttttttattactatcaatcattggttggaatttttttattttctctagaaatgttgatattttttctttgttatcattaattgcaatatcatgatgttctatttgaccactgtatttattaatcaatgtttttaaatcattataaaatgttaatttataataaccagtatcagtacggacataaatatgtccgtctgatgtactgattaagtcattttcttctgttaaaaaatctgctaacctgtctattgtttcaacttgtcttaaacttcttacgattctatcagccattgttcacacctcttatttgtatcgtttccaactaaactcaaagaaaaaacctaaaatacccattatgagaaaaccccccaaggaataccaacactataactattacccgttttaccgttccattttcttactggtaaataataacgtgtaccttgccagttgtaaccaatccatacatacccatctgataaacaaacttcgtcatatggtgtataaccatttggttggaaccaatatccattaggttcacttaatttaggactacctacacgtgcaaatattggtaaaaatccacatgtaaatgttgcattttcatttctgtaatatgtgccatattggttttgtttccattttccgaatgtgtttacttttgatgtttctaattcgttgctgttactagcagaaaatttaggtctaataaagtgtgttacaccgtcataataatgtgttcttattgttgctttttcccaaccgtcaaacccaccacctaaccagttttgctctaaacatgtataataatctaaattaccacttaacacacattgaatatgtccatattgtccatctgtatatacaccaacatcccctaattgtggtttaaagttcggtgtattttcatacaccattgctaaacctttaaagtcattattgattgcgtctttagcgttaccccacatacgaactttaccgtctgtaatgtaatatatataagcaacagctaagtcagcgcattgataaccaaatgctaaatcaaagtccacacctacaccctcatgcttatatatccattcttttgcttgttgttgtgatttcatgaaacattatcctttcttaacccaactatattgacgtttttttgtatctgcattaacgttactaaagaattctttatgttcggacacattagcctctaatgtttgtcttacttcaccgacagcgttaccacttgaaacacgtaaccatgcacccacttttttaatttcttctggtgcgtctctaaacaattccatttggttaccagtaatataatattcaccaggtgtcgtaacgtaagctatccagttattgtattgacttgcttctaaatactcttgatatggtgcgtctgttttgattgttgtccataaaccataatcccattttaatgtaaatacatcgagcgtcataccacgcatgattttaaccatttttcgaccagtagaaaaacgcgttaattcttgtactgtacctaatgtttgtgttgtagggtatacattgatgaaacaaccagcgtctataatttttttactaccattcattggcatatttttaagtttactagctgtaccaccgtcaatataatagaaccctgcttgtgttaagtcatttaagtcgtcaatatggtctggaattgataacgcacgtccatcgtcttttgttaatttatagttttgtgaacctctcgcacgtaatgcttcaaagtgttcatactcaccaagttgaaagaacccatataaattattgaatcgttttccaccaccgccattagtcatagcaagtaataacgatttacgttttgtttttggattggtataaatacaaataccctccggctctttaaagttatcacgtggaaaattaataccgtcttgatatgataatttaaacggataatcataaatcttttgaccagttgttaatgaatatttaccaatttgaacgtgtgaattaactgaactgttaccacttaaccagtataaatcatcaccatcaacggcaatcccttgcatccatcgattatcattgttttctgaattatcaatcgtcatttctttttctacattatcaatgtgattttttacgtcagctcttgaacgtacctgtattgtcccgtcaccgaatcttaaaacgattttgtcattttcttcatcaattaacggtgtaaacgtgtgtttgtttaaaagtgactgtggtgtataatctgttaaccctttagcctcttctaaatctaaaatataattatctttatatgcgacttgtaacagttttgctacaccgtcatgatgtaaccatattttcatttcaccgttagattgtctttctaaacctattgtagtaccgtgaccaccttgtacaatacgcatactagaaattaagtcaccgctaggcgttaatttattaatccaaaaaccttctgggttttgtgaatctgattgtgtagagtacatttgattcgtttctttatctatgtttatagattggttaacagcattacgaataccaccgaatcccataacaaactttggttcaagctcatttaattcaaaaccattaacaaaacggtcaatgtctttaattaagtctttaacttctgatttaaaatcattcatttgtttcatttctgcaactttaaataatgcaaatgcagatgtaagaccagtactatatttagtaaattcatcatgaataattttatctattgtaccgtcgtttaaccaacctctaaataagtctttcgcttggtctgggaatgctttcattaagtcgtcccaatttttgaaacgtttttttaattcattgtcatagtcccaaatacgacgtgctaatacttcaattagttttgataatcttgaaatataatcataatatgattttgaattggtattataatctgctctatcatcgtaaaacggtgtgtaacgttctctcgttttatatatttcgtctaaaaatggacgaatgtcgtcaaaatatttaaaatcgttttcattatatgccataattttccacctttaccaaatttgtaaaaaacattttttatcaaattcatttaaaattttctttcttaaatcgtatactttatcaatattatcaattaaatactgttttgaaaattgtgtacctttcgcattacctttttgattttgattacgttttgcgttttgattactttcgttacttgatttattcacagttttaccgttgtcaattgtattattatctgcaaatcgtaacgttgtgttatctacatcaatgttaacctcgctttgtggtaatgacgcataagcatttctgttcgctgtcatgccagttgaattgtctaaagatgttgcattttgatttgaggtttcatctgtattgtttgttgtatcttcattatgttctgtaaaaccttgtgattgtagatatttttcaacttcgcttgatgaataaaccacattcaaataatcctcatgtgtgatacatacagtaatcacttgcatgccaaaagcttcaactgtttgtctgttgatttctctatctaaaaagtgtattgtaaatgattttttaaaaagtaagtcagataagtcatctttaagtttaaaacctttaaacactttttcattaacgatggctaaaacgtctttgtcaaacttcaacattttttgcatgaattgaaattcatcatcataaaacgttaatttatcattatttacaaattcattaaaaccttttttaattaattctgatttaataaaatcaaataaagtcattgtatatctagccattgtattcactactttcatcattagacaatgtatctatcattgtgatttctgaagtaacttcatcgtcgtaatacggtttaatatctaaaccataacgttttgataagaatgtaatcggttcacgaccttttaaataaatattactatttgatgtggtaaaacctcggttgctttttgcctcttcgtccgaaacaccgctttccttatccactgctagtgagttaatacctaaatagttacttaattcactaattttattttggtattcgcgtttcatctcagttagtgctggaatcacactattactggttaaatctatgatatcatcatcggcgttaaacataggtgacattttaacaaatggtgcaccgttgtatatttccgatacaagttgattaactgactcatcattaatgtctgatttaaatattttgctaaattttgcttgcataattaatgagaatctagataaaacaacctcagataattcatcagtataatgttctataatttctatatcactattatattgaattggtttattttgcatgacaacaaagttaccactcatacagttatcatatattttatgaatctgtaagcattcatctggtattaaatagtctggaacaatgaaataaatatcatcttttgttaatcgtttttgaaattgaaagttaaagtttgatgaaaaatttggtgcttgattaaagtaagtattatttacgtaaccaagaatcataatttgttcatttcttgctttgccgaccactacattgatgttttgtcttaatgctgattctaattgaataaaatctataccaaccgtatcacgattggtatagttgatgagtagtggtaaaaattccaaataacgattaaacataagacgtttaaatctgttgcgatgttctacaactcttttgttgatttcttttgataattcaacctgtacacctttattatgtttagtcatttatagcacctctattattctgttcttggtgttacatcttggtcagtaattaaaattttattaaagaatgggctaatggctttaaatgaatagtaatgaatccagtgtgtgacttcatcaaattcaccattatagaatggttgttttaacataccttttgtgtaacgtttatatttaattgaattaatatccaaaataaacgcgtataaatctgattttggtttaatttcttcaacattatctttaaactctgatagttttgacacatcataagtgaatactgaaccaactggaattgtatcacctttatgagtttgataatcaccgtaagcacgtaagaaagctactgattcatcacttgatacgacaatatctttagtgactttgaaaacaccacctaggtcgtcaaaactgataacgtggtctgtaaagtcaatccctgctacttggaatgtgttcgcaatctttgtatctaaaagataagattttaagctatcagtcgttaaaataacaatatcttttaattttgaaactgttgtatattgtccgattgcaccacctgaagcacgatgaacttcattatatttagcgctgttgttttgtaagttaagaatagcttcaaaaactttacttgctaaatcttcttttgatgttgctttacgtacatttgattcagataattgattcaatgagtaatcaactaacattgcacgcatttctttttcttctaatacgttaatatcagaaattttctttttatagacacctaatgcataattagtagcgtctgctaatgtttggaaattgaaacgtgtgtcattgttatttaatgtaaatttttgtttcttcacaataccactaccatataacttagtagccatacgtggatagttacgtttcaacattagttcttcatttttagataagtccatgttaataggtactgtatccataattacatattcttcactgtattgacctataaagtcctgctctttagctaaccaattaaaacggttacctaatgcaatatcgattaataacgtttcattaatcttagggaataaaaatttatttacaaatgtttcaaacattgtattagaattatcccacttatcgccaaacgtccatgattttgaataagtatgattaaagtcttgtaatgcagatttagctgactttgcaactaatagtgctgtttcgttttttgtactcttttctgccatgatttattattcctcctcaacatcgccagtaaatgactgttttgaaagtgaatgaatttgtacaccataactatcttcacttttatttgtatcaattgacatattttcatttaattctgttcgtttatttaatcttgaatcttcatatgatgtacccatcatagaacgcatgttgttaccctcgtacatgtttaagttcctcctaatctaaatctaatttatcgacaagttcttcatctgaatagtctttatcattgttatctgtttcttttgattctggttgtggttgtggttgtggttgtggttgttgcatttgtgatgtttcaaaattagtaaatcgttgttctaatgaagcgatacgttgttctaaaacaactgggtctaattttgcacaatcttcatctgttgtagtaggttctaatttgttttcattttcttcttcgattgtttctactgttttatcttcagttgattcttcagttgattcttcagttgattctgaagtttcttcagttgattctgaagtttcttctttgtcgtctggttttacgatttcatcaaattctgtcattttgacacctccaaatattttataactaattatatcatagaatatttaaataagtaaattaaatttattttattttcaaatcataactttgaataaaagtcaatagatacataaattttgtatttaatgaatatgtaataggttagataagttggaaaagtagacgcacagtttttataagtttagtaaagaaatgatatgttaatttataagttttgatttgtataatcgtttattttaaacggtggggaggtgtaaatttacaataactttttccctattatatttgtaaatttacacctccccaccgtttaaaataaacgattatacaaatcaaaacttataaattaacatatcatttctttactaaacttataaaaactgtgcgtctacttttccaacttatctaacctattacatattcattaaatacaaaatttatgtatctattgacttttattcaaagt

SEQ ID NO: 123 - DNA, 18120 bp, Rosenblumvirus sp.
  source 1..18120: mol_type = genomic DNA
gaaaaagtttttgtaaaattacacctccccaccgtttaaaataaacgattatacaaatcaaaacttataaattcacttatcatttctttactaaacttataaaaactgtacgtctacttttccaacttatctaacctataacatattcatcaaatacaaaatttatgtatctattgacttttatcaaaatttatgatttgtatttaaaatctaatttcttctattaaatagtatttttaaattatttaaacttttttaagaaaaaccattgacaaaacttttaaacgtttgctatactatgtatgtaatcaaatcaaggaggtaacaaatggaaaatgtacaacctttacaaacttacattttaaaaaatggtaatatagttattgttatgggtaatacatcaacttatgaattaacattatttgtacttgaaaaggatgattttgaacaattagaccataattcacttaaaaaaatcgttgatgaaataaggaatgaaatcaatgatttaaggagtgataataatggttaatgttgataacgcacctgaagaaaaagggcaagcctatactgaaatgttgcaactattcaataagttgattcaatggaatccagcttatactttcgacaatgctattaatttagtatcagcttgccaacaactattattaaactataatagttctgttgttaaattcttaaatgatgaactaaacaacgaaactaaaccagaatctattttatcttacattgctggtgatgacccaatagaacaatggaatatgcacaaaggattttatgaaacgtataacgtttacgttttttagaaaggagtgatataataatgaaacctgatgatattgttacattacgaataaaaggttatattcttcattatttagatgataaaaatgaatatgttgaagaatttatcccacttcacgagtatcatttatcaaaatcacaagctaaagacttattacctaatacacacaaacttttatccactacacgacatactaaaactatgcaagtttattacaatgatttactacaaattgcaattgcagaaagcaaataatttaaataagaggagaaataaaaatgacaaacgtaaaagatattttatcaagacaccaaaacacattagcgagattcgaatttgaggaaaaagaaagagaatttatcaaactatcagaattagtagaaaaatacggtatgaaaaaagagtatatcgttagagcattattcacaaacaaagaatcaaaattcggtgtacaaggtgttatcgtcactgacgactataacgtaaacttaccgaatcacttaactgaattaattaaagacatgcgtcaagacgaggacgttgttaacattatcaatgctggtgaagttcaattcacaatttatgagtatgaaaataaaaaaggtcaaaaaggttattcaatcaactttggtcaagtatcattttaatacaatttcataggggatatttatcccctatttttatgaggtgctaaacaatggaaaaaatatacactgccgtattattatacaatgtatcaattaatgaaacatatgaacatgaaattgaacaattcgaaaaaataaataaagctaaggtaatatatagttattttgatgcaaacttttataaaaaaggtgcttataatctttgtgtaaaatacattaaggagatataaaaatgaatattacaacaatattaaacacaaaaaaattaattaattatattttagataatagagattgttttatgaataaaataacaaaatttgaatcactaagtggaaaatgtgttgtttttgttagatacggtgaaatttctattgaatactatgatagtgatacaaaatacaatgatttatttactttagacattgacgttgatgttcgtacatatagttttagttgtcttgaggttttttatcgagaacatttaaacccattatataaaaaagaagtttttatggattgtactattgatgacgtattagaatatttcgagaaaccaatagaaagtaatataacaataatttttcaaaacaaagtgatatataataacgggaacgtgatagaacatgactaatatattaaacatagctattgttttccttttagcatttttaattacacttgtaatacttatgacaatgcatatacgtgtgtcatttggtgttttatttactacattgattatattctacattatctttttagtggttatatatgggttatatggaggtcgttagcaatggttagacatacgtccgaaatggataaatggaaaaaagaaagagacgcaagaaaagagcaggaaaaagaattgtttttaaatgattttagtactgttaattttaaatttgatgataaagatttacaagaggcgtacatagacgcatggaaacatttcgcacatttgccctattttccaaaagaaagaaacgtgtcatatgtaaatgctgtatcattggtaagaggtaaaagacatgaacaattaaactatatacttgaaatatataaccgtaaagatgaatctaataataaaaacgctaaaaaacataaatatgctttatatgaattacaagctaaaaataataattcttctatgtataaatatattaaagaaattgacactttatacaaagaaattggtaaatcagacagaccagtgactactattgatgatgaagatgtgaggtataactttttatattatgcaacatttgaagactaattttaatactgtaaacgacatcataaactattataaggagcaaatacatggtgaaacaaaatcgtttagacatggtaagagattatcaaaatgctgtcaatcatgtcagaaaaaaaataccagataactataatcaaatagaattagttgatgaactcatgaatgatgatatagactattacatatctatttcaaaccgttctgacggaaaatcgttcaactatgtttcattctttatttatttagctataaaacttgatattaaatttactttattatcacgtcattatacattacgtgacgcttatcgtgattttattgaggaaatcatagacaaaaacccactattcaaatctaagcgtgtcacattcagaagcgctagggactatttagctatcatctatcaagataaggaaatcggtgtgattacagatttgaatagtgcaactgatttaaaatatcattctaactttttaaaacactaccctatcattatatatgatgaatttttagcacttgaagatgactatttaattgacgagtgggataagttaaaaacaatttatgaatcaatcgaccgtaaccatggtaatgttgattatatcggcttccctaaaatgtttttactaggtaatgctgtcaacttttcaagtcctatattatccaatttaaatatatataacttattacaaaaacataaaatgaacacatcacgactttacaaaaatatttttttagaaatgcgaagaaacgattacgtaaatgaaaagcgtaacacacgggcattcaattcaaacgatgacgctatgactactggcgagtttgaatttaacgaatataatttggcagatgataatttaagaaatcatatcaatcaaaacggtgattttttctatattaaaactgacgataaatatataaaaattatgtataatgttgatacatttaatgctaatattattgttataccttatacaaaacaatatgaattttgtactaaaatcaaagatatagatgacaatgttatttatttaagagaagatatgttttataaagaaaacatggagcgttattattacaatccaagcaatttacattttgataacgcttactcaaaaaattacgttgttgataatgatagatatttatatttagatatgaataaaattataaaatttcatataaaaaatgaaatgaagaaaaatatgagtgaatttgaaagaaaagaaaaaatatatgaagataactatattgaaaatacaaagaagtatttaatgaaacaatacggcttataaaaggtgtgtaagattatgggattactagaatgcatgcaatatcataaacatgaacgtcgaatgattttatactgggatatagaaacattagcgtacaataaagttaacggacgaaaaaaaccaaccaaatataaaaacgtaacgtattcagtagcaattggttggtttaatggttatgagattgatgtagaagtatttcctagttttgaatcgttttatgacgcattttatacgtatgtgaaacgacgtgatacaatcactaagtcaaaaacagatattatcatgattgcacataactgtaataagtatgacaaccattttttacttaaagataccatgcgttattttgataatatcacacgcgaaaatatatatttaaaatctgcagaagaaaacgaacacacactaaagatgcaagaggctactattttagctaaaaatcaaaatgtgattttagaaaaacgtgtgaaatcgtctattaatttagacttaacaatgtttttaaatggatttaaatttaatattattgataactttatgaaaaccaatacatcaattgcaacattaggtaaaaagttgcttgacggtggttatttaacagacgaccaacttaaaacagattttaattacacgatatttgataaagataacgatatgtcagatagtgaagcctatgactatgctgttaagtgttttgctaaactcacacctgaacaacttacatacattcataatgacgtgattatattaggtatgtgccatattcattatagtgatatatttccaaattttgactataacaaattaacattttcattgaatattatggaatcgtatttaaataatcaaatgacgcgttttcagttactcaatcaatatcaagatattaaaatatcatatacacattaccatttccatgatatgaatttttatgactatatcaaatcattttatcgtggtggtttaaatatgtataacactaaatacataaacaaacttattgatgagccttgtttttctattgatatcaattccagttatccttatgtgatgtatcatgagaaaattccgacatggttatacttttatgaacattattcagaacctacattaatccctacttttttagatgatgacaattatttttcattatataagattgataaagatgtatttaacaatgatttattaattaaaatcaaatcacgtgtattacgtcaaatgattgtaaaatactataataatgataatgattacgttaatattaatacaaatacattaagaataattcaagacattacgggtattgattgcacgcatatacgtgttaattcgtttgtgatatatgaatgtgaatactttcatgcacgtgatattatatttcaaaactattttattaaaacacaaggtaagttaaaaaacaaaatcaacatgacatcaccttacgactatcatattactgatgacatcaacgaacacccttactcaaatgaggaggttatgttgtctaaagttgtacttaacggattatatggcatacctgcattacgttcacattttaacttattccgtttagatgataacaatgaactatacaatattattaacggttacaaaaacacagaacgtaatattttattttctacatttgtaacatcacgttcattgtataacttattagtaccattccaatacttaacggaaagtgaaattgacgacaattttatttattgtgatactgatagtttgtatatgaaatccgttgttaaacccttattgaaccccagtttattcgacccgatagccttaggtaaatgggatattgaaaacgaacagatagataagatgtttgtactgaatcataaaaaatatgcatatgaagtgaatggaaagattaaaattgcttctgctggtatacctaaaagcgcctttgatacaagcgtcgattttgaaacctttgtacgtgaacaattctttgacggtgcgattatagaaaacaataaaagtatctataatgaacagggtacaatatcgatttatccgtctaaaacagaaattgtatgtggtaatgtatatgatgaatatttttctgatgaacttaatatgaaacgtgaatttatattaaaagacgctagagaaaattttgaccatagtcaatttgatgatattctttatattgaaagtgacattggttcgttttcacttaacgacttatttcctgttgaacgttcagttcataacaaatctgatttgcatatattaaaacgcgaacatgatgaattaaaaaaaggcaactgttaaataacagttgcctttttcttttgagataacatgaaaaatgtgtacgaaaattgattatgttttgtattttatttactagcattactagcatgtgttcattatagcatagttaattaagcaataccactgaagaatacaatattatcaccagcgttatgaggtacaccattaatcaatgtatataatacaacccgtgacggtgcgacgtatggtggtacgttatagtttgctactaagaatgaaccatcgtcaaatactgctacaacgacacctgtgtgaccaatgccatatgctgttgcttgtaagtatggtggtttacttgaaaaaccataaccaacagtagggttgtgtgttgtttttgcacctaactttttatagacgtaccatacacgttgaccgtttgtcacttgaccgtcgtctgtcggttgtcttttaccatgtaattgtgacatatacgcccatgttaattctgtacactgacctgcattacccgtttgaggaaatatgttacctggtttgtataaatattcttttttgaataaaggtacaccaattgcttttttatatttttctggtaactgtgcgtatgtccagttaccaccaatgacgcgaccacttttaccattaggtttgactgatttaccactaattggtttatggtctccgtcatcatcagtagggtttgaactactacccccactatctacttgcacgctatcaatcagtttttttaatgaatcgagtagcccaatcgtcattttaatatgatatgtgttgttaaatgttttttgtaatgtaaaataatcattactaaaaaatttgtcgctacctatactgtgtacatcccattgtaatgcgtcttgtactttttttaataattcttgcatggcttgttttgctaaagcgagcagtgaactaccactgtcaccactactaccactgtcagacgaatcactaggtgaaccacctttaccgtctaatttaccaccccacgcaagaatagtattcgcaccgtctaaaaaaggattaccatagttttgtactttattatatgacgctttcaaacctaggggataatatgccgcccaagtagccgctgctgttaatggaatatacgcacgtccgattgtacctgctttcatatttttagcaaaatctgcattaccttttctttgtacgtcttgcggtacaaaatgcactggattaccgtaatcataccaagacggttgtcctgcttgttttgattgtgatactaattttcttgcaatgaatttagcgtctgttaaatagtcacctcgtgcagatgtatggttcaaccaacctaaacccgcgctatacccttcatttttttcatatacagcaaaaagagtaggtgacacacctatctcttttactgcttttaatacttgtctgattttactttcattaccacctagccatacattaaagcgtccatacccttttactttagggactaactggtctatcgttaaaccgaaatcatcattaatatacgaatgcgtaaatttatctatcttctcttggtcgttcattattatcacccttttcagaatcgtttttaattactcttaatttatctttaatttgttctggtactaatacgtccatttctgcacaattttctacgatagataagccctcattagcgatataatagaaaatcgtaatcatgagtaagccaccttttaattgtaaaatctggtcaatgatgttagctaaaatgataatacagaatatcaataattttttagcaaaacctttcattgattttttagaccatagattattatttttaattgctttagcaaaaccagtaacaacatctataatcatcaaaacaaataaaaaatatagtaactttaaatcacctgcatatatgaacatatgaaatgcttctgtgtccgtaaatcttaattttacctcattcattttatacaccttctctaaatttattatttaacgggttctgtaacattggattacctgaaccgtcattatgccaaaatctcacaccagattctaaaattgcttttaattgttccattaacatggggtcaatgtcacgtatggtatacgtacctgtacattttaaatagttgcaaacagtcatactgttaattggttcaataaatgaattatagtcattcacttcaaaaccaaacaacatataatatttttgtaaaaatgtaatttctttaggtgacggtacactaattttcatcgttaaaccgttaatactgtttgcaatttggaatgcgttgcccatttccgactctgtcactgacggtggttgtaatgctaaatctttatattctgcttgttgttgtttgtagaaattatattcttcattaaacttaccaaataaagcagtcggacttaaattacttgctacacttacagcgtcataaaaacgtgattttgggtcactaccatttaatacattatctatacgacttgtgattaattgactttctgcattacgctgtctattggcttgttgtgattgtcctaaaattccgttattaattaatataggcacttgcgcaaaactattaaatgttatattggtatttaagaatgaacctgtatcaattaatatatctttatttttagcaagtatcggtctatcgttttcagcactgttataatcaactggatatactcgcacttcattatgataaccaatgatggattttgtacgtaacttaacacctgttttttgtgaaattttaccagcgtcaagtaacattgtgttaccgttccagtcataaaattcaatcgtcatgtactcattacgtatcatatgtttaaactcgtcttttttagacaacatcatctcttgaagctttgtgaaacttaatgataaatcgtttaaactccattcttttgattttccaccctgttttaatgtctttaatccagtaattttttcacttgtcttaacgtcctctaaatcttttgtattaataaaatctttaggtaacatttgaaccttttgaaagttttgtgtaatccatggatatgcactcattttatccataaagttaataaagtcaccatattccataacgtataagttgactggcgatgtgatattgtcatatatcgtacctttagacgtatctaagtttggctcttttttcgtaccaaatttctttgataaatcagcgcttgactggaataacactaaattttccaaatactgttgcatttggttatacacatagtttttatttgatacttttaacacatcatcattgttacgtaacatcggcaacatatagttatacgtacgctttgataagtgttgacgttcaatattaacgtttgaaagttgttctaatacattaccttgtgtatacgtcataatagtatcaatcacaaaatatatttttaccacaacatcattcacatattcgatttgattcacaaaagcgtaatagcgtctgtcctcaaaatctgataaaaacgtcatgtagttaatcccttgtgcgtcatgccactgcatatcaacattgatttccattctatcacgtataaaattatacggttgtttggaatagtctaatgatttaaaatgacgaccgtttaaaaaataatcatcacgctctttattactattaaaatgaattgtattttgatagtctgtaaacggtgtgttatagaaaaatttaaaatttgttaattttctcatttttacctccataaaaaatagtcgtataaataatttatacgactattataacatttttattcaatgatttgtgtatctattgcaaaacgtttatctccatttgttaagtcactatcgctataatttgatgtaacaaaatgtaattcattattaaagtttaaatataatcttgtattaatcattttcgaatcaatcgcactttgtgtgtagtgatgtgttgattttaagttagcgttaatcgtacctaatttaatatcaccgtttttcttaatcccttttaataccccttttaattgtatggttttaacaccattaattgttacaatacgatattgcggtgcgggataaccaccgttgctatcacttgcaactataccactttctagcaatatatcttgccaacctgtatcattaaattgtaattttgcactgttgattttttgatcaaaattttgttcaatttctgatttagattgtgcaattttagtatctatatttaagttgtccactcttgttgataaagtgttaatacttgattcatttgttgatgttttttgttttaaatcattaatatcattatcatattttgataaatcaatatgtccgtttccgtcaacaactggtctatcttttaattcttgaatatctttttcaatttttgatattttatcattatttgtttttaaagcagcgatgtcagatttaattgaattaatatcctgtgtataatctttttggttaatactgtttaattttgtttctaactcttttatcttatcaaggttggcatttgctttgatgtcattaatggtttgttctaaactttcaagtttcccagcacttgaattttgttttaacttattaatatcctcttgtatttcttgaattgtgttgtcattgttttgtttagattttaataattcaatctgttgttcaatatcttttattttatcaagattgatactttttttaacttcagctaattctctttttaacgcgtcaatgttttctgcaccagtattagctttaattaaattaatttcatttgtgtttcgtcctacactatctttagtagcgtttaacgattgtgtaagtgtttcatatttatcatcatactgtaacattgatttttcaaattcatttaattgtgtttgatgttgttctaaactttcatttaatatgacatctttttcttttaatgaatcaatctcttttttattactatcaatcattggttggaatttttttattttctctagaaatgttgatattttctctttattatcattaattgcaatatcatgattttctatttgaccactgtatttattaatcaatgtttttaaatcattataaaatgttaatttataataaccagtatcagtacggacataaatatgtccgtctgatgtactgattaagtcattttcttctgttaaaaaatctgctaacctgtctattgtttcaacttgtcttaaacttcttacgattctatcagccattgttcacacctcttatttgtatcgtttccaactaaactcaaagaaaaaacctaaaatacccattatgagaacaccccccaaggaataccaacactgtaactattacctgttttaccgttccattgtctcactggtaaataataacgtgtaccttcccaattgtaaccaatccatacatacccgtctgataaacaaacttcgtcatatggtgtatagccgtttggttggaaccaatagccattaagctcagataatttcggactaccgacacgagcaaatattggtaaaaaaccacatgtaaatgtagcattttcatttctgtaatatgtgccgtattggttttgtttccagttgttagtttgttgaatatttttttctaatactttactatcactatttgaaaattttggacgaataaaatgcgtaacaccgtcataataatgtgttcttattgttgctttttcccaaccatcatatccaccatttaaccagttttgttctaagcatgtataataatcaagatttccacttgttacacattgaatatgcccatattgagaattagtgtatacagcaacgtcacataattgaggtttaaagctaggtgtattttcatacaccgctgctaaacctttaaagtcgttgttaatggcgtctttggcattaccccacatgcgaactttaccgtcagtaatgtaataaacataagcaactgctaagtccatacattgaaaaccatatactccatcaaagtcaactccaacaccctcatgcttatatatccattcttttgcttgttgttgtgatttcatgaaacattatcctttcttgacccaactatattgacgtttttttgtatctgcattaacgttactaaagaattctttatgttcggacacattagcctctaatgtttgtcttacttcaccgacagcgttaccacttgaaacacgtaaccatgcacccacttttttaatttcttctggtgcgtctctaaacaattccatttggttaccagtaatataatattcaccaggtgtcgtaacgtaagctatccagttattgtattgacttgcttctaaatactcttgatatggtgcgtctgttttgattgttgtccataaaccataatcccattttaatgtaaatacatcgagcgtcataccacgcatgattttaaccatttttcgaccagtagaaaaacgcgttaattcttgtactgtacctaatgtttgtgttgtagggtatacattgatgaaacaaccagcgtctataatttttttactaccattcattggcatatttttaagtttactagctgtaccaccgtcaatataatagaaccctgcttgtgttaagtcatttaagtcgtcaatatggtctggaattgataacgcacgtccatcgtcttttgttaatttatagttttgtgaacctctcgcacgtaatgcttcaaagtgttcatactcaccaagttgaaagaacccatataaattattgaatcgttttccaccaccgccattagtcatagcaagtaataacgatttacgttttgtttttggattggtataaatacaaataccctccggctctttaaagttatcacgtggaaaattaataccgtcttgatatgataatttaaacggataatcataaatcttttgaccagttgttaatgaatatttaccaatttgaacgtgtgaattaactgaactgttaccacttaaccagtataaatcatcaccatcaacggcaatcccttgcatccatcgattatcattgttttctgaattatcaatcgtcatttctttttctacattatcaatgtgattttttacgtcagctcttgaacgtacctgtattgtcccgtcaccgaatcttaaaacgattttgtcattttcttcatcaattaacggtgtaaacgtgtgtttgtttaaaagtgactgtggtgtataatctgttaaccctttagcctcttctaaatctaaaatataattatctttatatgcgacttgtaacagttttgctacaccgtcatgatgtaaccatattttcatttcaccgttagattgtctttctaaacctattgtagtaccgtgaccaccttgtacaatacgcatactagaaattaagtcaccgctaggcgttaatttattaatccaaaaaccttctgggttttgtgaatctgattgtgtagagtacatttgattcgtttctttatctatgtttatagattggttaacagcattacgaataccaccgaatcccataacaaactttggttcaagctcatttaattcaaaaccattaacaaaacggtcaatgtctttaattaagtctttaacttctgctttaaaatcattcatttgtttcatttctgcaactttaaataatgcaaatgcagatgtaagaccagtactatatttagtaaattcatcatgaataattttatctattgtaccgtcgtttaaccaacctctaaataagtctttcgcttggtctgggaatgctttcattaaatcgtcccagtttctaaaacgtttttttaactcaccgtcatagtcccaaatacgatgtgctaatacttcaatgagctttgataatcttgaaatataatcataatatgattttgaattggtattataatctgctctatcatcgtaaaacggtgtgtaacgttctctcgttttatatatttcgtctaaaaatggacgaatgtcgtcaaaatatttaaaatcgttttcattatatgccataattttccacctttaccaaatttgtaaaaaacattttttatcaaattcatttaaaattttctttcttaaatcgtatactttatcaatattatcaattaaatactgttttgaaaattgtgtacctttcgcattacctttttgattttgattacgttttgcgttttgattactttcgttacttgatttattcacagttttaccgttgtcaattgtattattatctgcaaatcgtaacgttgtgttatctacatctatgttaacctcgctttgtggtaatgacacataagcatttctgtttgctgtcatgccagttgaattgtctaaagatgttgcattttgatttgaagtttcatcagtgttgcttattgtatcttcgttgtgttctgtgaagccttgtgattgaagatatttttctacttcacttgatgaataaaccacattcaaataatcctcatgtgtgatacatacagtaatcacttgcatgccaaaagcttcaactgtttgtctgttgatttctctatctaaaaagtgtattgtaaatgattttttaaaaagtaagtcagataagtcatctttaagtttaaaacctttaaacactttttcattaacgatggctaaaacgtctttgtcaaacttcaacattttttgcatgaattgaaattcatcatcataaaacgttaatttatcattatttacaaattcattaaaaccttttttaattaattctgatttaataaaatcaaataaagtcattgtatatctagccattgtattcactactttcatcattagacaatgtatctatcattgtgatttctgatgtaacttcatcgtcgtaatacggtttaatatctaaaccatatcgttttgataagaatgtaataggttcacgaccttttaaataaatattactatttgatgtggtaaaacctcggttgctttttgcctcttcgtcagaaacaccgctttccttatccactgctagtgaattaatacctaaatagttacttaattcactaattttattttggtattcacgtttcatctcagttagtgctggaatcacactattactggttaaatctatgatatcatcatcggcgttaaacataggtgacattttaacaaatggtgcaccgttgtatatttccgatacaagttgattaactgactcatcattaatgtctgatttaaatattttgctaaattttgcttgcataattaatgagaatctagataaaacaacctcagataattcatcagtataatgttctataatttctatatcactattatattgaattggtttattttgcattacaacaaaattaccactcatacagttatcatatattttatgaatctgtaagcattcatctggtattaaatagtctggaacaatgaaataaatatcatcttttgttaatcgtttttgaaattgaaaattgaaatttgatgaaaagtttggggcttgattaaaataagtgttgttaacatagcccaaaatcataatttgttcatttcttgctttaccaacaacaacattaatgttttgccttaatgcagattctaattgaataaaatctataccaaccgtatcacgattggtatagtttattaataggggtaaaaattccaaataacgattaaacataagacgtttaaatctgttgcgatgttctacaacacgtttattgatttctttagataattcaacctgtacgcctttattatgtttagtcatttatatcacctctattattctgttctcggtgttacatcttggtcagtaattaaaattttgttaaagaatgggctaatggctttaaatgaatagtaatgaatccagtgtgtaacttcatcaaattcaccattatagaatggttgttttaacattccttttgtgtaacgtttatatttaattgaattaatatccaaaataaaagcgtataaatctgattttggtttaatttcttcaacgttagacttaaattcagataaatttgaaacatcataagtgaatactgaaccaactggaattgtatcacctttatgagtttgataatcaccgtaagcacgtaagaaattaactgattcgtcacttgatacgacaatatctttagtaactttaaaaactccacctaaatcatcaaaactaataacgtggtctgtaaagtcaatccctgctacttggaacgtgttcgcaatctttgtatctaaaagataagattttaagctatcagtcgttaatataacaatatcttttaattttgaaactgttgtatattgtccaatagcgccacctgaagcacgatgaacttcattatatttagcactgttgttttgtaagttaagaatagcttcaaaaactttacttgctaaatcttcttttgatgttgctttacgtacatttgattcagataattgattcaatgaataatcaactaacattgcacgcatttctttttcttctaatacgttaatatcagaaattttctttttatagacacctaatgcataattagttgcgtctgctaatgtttggaaattaaagcgtgtatcattgttatttaatgtgaatttttgtttcttcacaataccactaccatataacttagtagccatacgtggataattacgttttaacattaattcttcatttttagataaatccatgttaataggtactgtgtccataattacatattcttcactgtattgaccaataaagtcctgctctttagctaaccaattaaaacgattacctaatgcaatatcgattaataacgtttcattaatcttagggaataaaaatttatttacaaatgtttcaaacattgtattagaattatcccacttatcgccaaacgtccatgattttgaataagtatgattaaagtcttgtaatgcagatttagctgactgtgcaactaatagtgctgtttcgttttttgtactcttttctgccatgatttattattcctcctctacatcgccagtgaatgactgttttgaaagtgaatgaatttgtacaccataactatcttcacttttgtttgtatcaattgacatattttcatttaattctgttcgtttatttaatcttgaatcttcatatgatgtgcccatcatagaacgcatattgttaccctcatacatgtttaaattcctcctaatctaaatctaacttatccactaattcttcatctgaataatctttgtcgttgtcatctgcttcagtaacatctggttgtggttgtggttgtggttgtggttgttgcatttgtgatgtttcaaaattagtaaatcgttgttctaatgaagcgatacgttgttctaaaacaacagggtctaattttgcactatcttcatcagtaatagtaggttctaatttgttttcattttcttcttcaattgtttctactgattcactttcagacgattcttcagtttcttctgttgattcttcagttgattcttcagttgattctgaagaatcttctttctcgtcaggttttataatttcttcaaattcagtcattaatacacacctccaaatattttatatcttattatatcatagaatatttaaataagtaaattaaaattattttaagttcaaatcataaattttgataaaagtcaatagatacataaattttgtatttgatgaatatgttataggttagataagttggaaaagtagacgtacagtttttataagtttagtaaagaaatgataagtgaatttataagttttgatttgtataatcgtttattttaaacggtggggagg

SEQ ID NO: 124 - DNA, 18121 bp, Rosenblumvirus sp.
  source 1..18121: mol_type = genomic DNA
gttattgtaaatttacacctccccaccgtttaaaataaacgattatacaaatcaaaacttataaattaacatatcatttctttactaaacttataaaaactgtgcgtctacttttccaacttatctaacctattacatattcattaaatacaaaatttatgtatctattgacttttattcaaagttatgatttgaaaataaaataaatttaatttacttatttaaatattctatgatataattagttataaaatatttggaggtgtcaaaatgacagaatttgatgaaatcgtaaaaccagacgacaaagaagaaacttcagaatcaactgaagaaacttcagaatcaactgaagaatcaactgaagaatcaactgaagataaaacagtagaaacaatcgaagaagaaaatgaaaacaaattagaacctactacaacagatgaagattgtgcaaaattagacccagttgttttagaacaacgtatcgcttcattagaacaacgatttactaattttgaaacatcacaaatgcaacaaccacaaccacaaccacaaccacaaccagaatcaaaagaaacagataacaatgataaagactattcagatgaagaacttgtcgataaattagatttagattaggaggaacttaaacatgtacgagggtaacaacatgcgttctatgatgggtacatcatatgaagattcaagattaaataaacgaacagaattaaatgaaaatatgtcaattgatacaaataaaagtgaagatagttatggtgtacaaattcattcactttcaaaacagtcatttactggcgatgttgaggaggaataataaatcatggcagaaaagagtacaaaaaacgaaacagcactattagttgcaaagtcagctaaatctgcattacaagactttaatcatacttattcaaaatcatggacgtttggcgataagtgggataattctaatacaatgtttgaaacatttgtaaataaatttttattccctaagattaatgaaacgttattaatcgatattgcattaggtaaccgttttaattggttagctaaagagcaggactttataggtcaatacagtgaagaatatgtaattatggatacagtacctattaacatggacttatctaaaaatgaagaactaatgttgaaacgtaactatccacgtatggctactaagttatatggtagtggtattgtgaagaaacaaaaatttacattaaataacaatgacacacgtttcaatttccaaacattagcagacgctactaattatgcattaggtgtctataaaaagaaaatttctgatattaacgtattagaagaaaaagaaatgcgtgcaatgttagttgattactcattgaatcaattatctgaatcaaatgtacgtaaagcaacatcaaaagaagatttagcaagtaaagtttttgaagctattcttaacttacaaaacaacagcgctaaatataatgaagttcatcgtgcttcaggtggtgcaatcggacaatatacaacagtttcaaaattaaaagatattgttattttaacgactgatagcttaaaatcttatcttttagatacaaagattgcgaacacattccaagtagcagggattgactttacagaccacgttatcagttttgacgacctaggtggtgttttcaaagtcactaaagatattgtcgtatcaagtgatgaatcagtagctttcttacgtgcttacggtgattatcaaactcataaaggtgatacaattccagttggttcagtattcacttatgatgtgtcaaaactatcagagtttaaagataatgttgaagaaattaaaccaaaatcagatttatacgcgtttattttggatattaattcaattaaatataaacgttacacaaaaggtatgttaaaacaaccattctataatggtgaatttgatgaagtcacacactggattcattactattcatttaaagccattagcccattctttaataaaattttaattactgaccaagatgtaacaccaagaacagaataatagaggtgctataaatgactaaacataataaaggtgtacaggttgaattatcaaaagaaatcaacaaaagagttgtagaacatcgcaacagatttaaacgtcttatgtttaatcgttatttggaatttttaccactactcatcaactataccaatcgtgatacggttggtatagattttattcaattagaatcagcattaagacaaaacatcaatgtagtggtcggcaaagcaagaaatgaacaaattatgattcttggttacgtaaataatacttactttaatcaagcaccaaatttttcatcaaactttaactttcaatttcaaaaacgattaacaaaagatgatatttatttcattgttccagactatttaataccagatgaatgcttacagattcataaaatatatgataactgtatgagtggtaactttgttgtcatgcaaaataaaccaattcaatataatagtgatatagaaattatagaacattatactgatgaattatctgaggttgttttatctagattctcattaattatgcaagcaaaatttagcaaaatatttaaatcagacattaatgatgagtcagttaatcaacttgtatcggaaatatacaacggtgcaccatttgttaaaatgtcacctatgtttaacgccgatgatgatatcatagatttaaccagtaatagtgtgattccagcactaactgagatgaaacgcgaataccaaaataaaattagtgaattaagtaactatttaggtattaactcactagcagtggataaggaaagcggtgtttcggacgaagaggcaaaaagcaaccgaggttttaccacatcaaatagtaatatttatttaaaaggtcgtgaaccgattacattcttatcaaaacgttatggtttagatattaaaccgtattacgacgatgaagttacttcagaaatcacaatgatagatacattgtctaatgatgaaagtagtgaatacaatggctagatatacaatgactttatttgattttattaaatcagaattaattaaaaaaggttttaatgaatttgtaaataatgataaattaacgttttatgatgatgaatttcaattcatgcaaaaaatgttgaagtttgacaaagacgttttagccatcgttaatgaaaaagtgtttaaaggttttaaacttaaagatgacttatctgacttactttttaaaaaatcatttacaatacactttttagatagagaaatcaacagacaaacagttgaagcttttggcatgcaagtgattactgtatgtatcacacatgaggattatttgaatgtggtttattcatcaagcgaagttgaaaaatatctacaatcacaaggttttacagaacataatgaagatacaacaaacaatacagatgaaacctcaaatcaaaatgcaacatctttagacaattcaactggcatgacagcgaacagaaatgcttatgcgtcattaccacaaagcgaggttaacattgatgtagataacacaacgttacgatttgcagataataatacaattgacaacggtaaaactgtgaataaatcaagtaacgaaagtaatcaaaacgcaaaacgtaatcaaaatcaaaaaggtaatgcgaaaggtacacaattttcaaaacagtatttaattgataatattgataaagtatacgatttaagaaagaaaattttaaatgaatttgataaaaaatgttttttacaaatttggtaaaggtggaaaattatggcatataatgaaaacgattttaaatattttgacgacattcgtccatttttagacgaaatatataaaacgagagaacgttacacaccgttttacgatgatagagcagattataataccaattcaaaatcatattatgattatatttcaagattatcaaaactaattgaagtattagcacgtcgtatttgggactatgacaatgaattaaaaaaacgtttcaaaaattgggacgacttaatgaaagcattcccagaccaagcgaaagacttatttagaggttggttaaacgacggtacaatagataaaattattcatgatgaatttactaaatatagtactggtcttacatctgcatttgcattatttaaagttgcagaaatgaaacaaatgaatgattttaaatcagaagttaaagacttaattaaagacattgaccgttttgttaatggttttgaattaaatgagcttgaaccaaagtttgttatgggattcggtggtattcgtaatgctgttaaccaatctataaacatagataaagaaacgaatcaaatgtactctacacaatcagattcacaaaacccagaaggtttttggattaataaattaacgcctagcggtgacttaatttctagtatgcgtattgtacaaggtggtcacggtactacaataggtttagaaagacaatctaacggtgaaatgaaaatatggttacatcatgacggtgtagcaaaactgttacaagtcgcatataaagataattatattttagatttagaagaggctaaagggttaacagattatacaccacagtcacttttaaacaaacacacgtttacaccgttaattgatgaagaaaatgacaaaatcgttttaagattcggtgacgggacaatacaggtacgttcaagagctgacgtaaaaaatcacattgataatgtagaaaaagaaatgacgattgataattcagaaaacaatgataatcgatggatgcaagggattgccgttgatggtgatgatttatactggttaagtggtaacagttcagttaattcacacgttcaaattggtaaatattcattaacaactggtcaaaagatttatgattatccgtttaaattatcatatcaagacggtattaattttccacgtgataactttaaagagccggagggtatttgtatttataccaatccaaaaacaaaacgtaaatcgttattacttgctatgactaatggcggtggtggaaaacgattcaataatttatatgggttctttcaacttggtgagtatgaacactttgaagcattacgtgcgagaggttcacaaaactataaattaacaaaagacgatggacgtgcgttatcaattccagaccatattgacgacttaaatgacttaacacaagcagggttctattatattgacggtggtacagctagtaaacttaaaaatatgccaatgaatggtagtaaaaaaattatagacgctggttgtttcatcaatgtataccctacaacacaaacattaggtacagtacaagaattaacgcgtttttctactggtcgaaaaatggttaaaatcatgcgtggtatgacgctcgatgtatttacattaaaatgggattatggtttatggacaacaatcaaaacagacgcaccatatcaagagtatttagaagcaagtcaatacaataactggatagcttacgttacgacacctggtgaatattatattactggtaaccaaatggaattgtttagagacgcaccagaagaaattaaaaaagtgggtgcatggttacgtgtttcaagtggtaacgctgtcggtgaagtaagacaaacattagaggctaatgtgtccgaacataaagaattctttagtaacgttaatgcagatacaaaaaaacgtcaatatagttgggttaagaaaggataatgtttcatgaaatcacaacaacaagcaaaagaatggatatataagcatgagggtgtaggtgtggactttgatttagcatttggttatcaatgcgctgacttagctgttgcttatatatattacattacagacggtaaagttcgtatgtggggtaacgctaaagacgcaatcaataatgactttaaaggtttagcaatggtgtatgaaaatacaccgaactttaaaccacaattaggggatgttggtgtatatacagatggacaatatggacatattcaatgtgtgttaagtggtaatttagattattatacatgtttagagcaaaactggttaggtggtgggtttgacggttgggaaaaagcaacaataagaacacattattatgacggtgtaacacactttattagacctaaattttctgctagtaacagcaacgaattagaaacatcaaaagtaaacacattcggaaaatggaaacaaaaccaatatggcacatattacagaaatgaaaatgcaacatttacatgtggatttttaccaatatttgcacgtgtaggtagtcctaaattaagtgaacctaatggatattggttccaaccaaatggttatacaccatatgacgaagtttgtttatcagatgggtatgtatggattggttacaactggcaaggtacacgttattatttaccagtaagaaaatggaacggtaaaacgggtaatagttatagtgttggtattccttggggggttttctcataatgggtattttaggttttttctttgagtttagttggaaacgatacaaataagaggtgtgaacaatggctgatagaatcgtaagaagtttaagacaagttgaaacaatagacaggttagcagattttttaacagaagaaaatgacttaatcagtacatcagacggacatatttatgtccgtactgatactggttattataaattaacattttataatgatttaaaaacattgattaataaatacagtggtcaaatagaacatcatgatattgcaattaatgataacaaagaaaaaatatcaacatttctagagaaaataaaaaaattccaaccaatgattgatagtaataaaaaagacattgattcattaaaagaaaaaaatgtcatattaaatgaaagtttagaacaacatcaaacacaattaaatgaatttgaaaaatcaatgttaaagtatgatgataaatatgaaacacttacacaatctttaaacgctactaaagatagtgtaggacgaaacacaaatgaaattaatataattaaatcaaatactggtgcagaaaacattgacgcattaaaaagagaattagctgaagttaaaaaaagtgttaatcttgataaaataaaagacatagaaagtcaaattgaattattaaaatctaaacaaaacaatgacaacacaattcaagaaatacaagaggatattaataagttaaaacaaaattcaagttctgggaaacttgaaagtttagaacaaaccattaatgacatcaaagcaaataccaaccttgataagataaaagagttagaaacaaaattaaacagtattaaccaaaaagattatacacaggatattaattcaattaaatctgacatcgctactttaaaaacaaataatgataaaatatcaaaaattgaaaaagttattcaagaattaaaagacagaccagttgttgacggaaacggtcatattgatttatcaaaatatgataatgatattagtgatttaaaacaaaaaacatcaacaaacgaatcaagtataagcgttttatcaacaaaagtggataacttaaatatagatactaaaattgcacaatctaaatcagaaattgaacaaaattttgatcaaaaaattaacagtgcaaaattacaatttaatgatacaggttggcaagatgtgcaacttgaaagtggtattgttgcaagtgatagcaacgggggttatcccgcaccgcaatatcgtattgtaacaattaatggtgttaaaaccatacaattaaaaggggtattaaaagggattaagaaaaacggtgatattaaattaggtacgattaacgcaaacttaaaatcaacacatcactacacacaatgtgcgattgataataaaatgatgaatacaagattatatttaaactttaataatgaattacattttgttacatcaaattatagcgatagtgacttaacaaatggagataaacgttttgcaatagatacacaaatcattgaataaaaatgttataatagtcgtataaattatttatacgactattttttatggaggtaaaaatgagaaaattaacaaattttaaatttttctataacacaccgtttacagactatcaaaatacaattcattttaatagtaataaagagcgtgatgattattttttaaacggtcgtcattttaaatcattagactattccaaacaaccgtataattttatacgtgatagaatggaaatcaatgttgatatgcagtggcatgacgcacaagggattaactacatgacgtttttatcagattttgaggatagacgctattacgcttttgtgaatcaaatcgaatatgtgaatgatgttgtggtaaaaatatattttgtgattgatactattatgacgtatacacaaggtaatgtattagaacaactttcaaacgttaatattgaacgtcaacacttatcaaagcgtacgtataactatatgttgccgatgttacgtaacaatgatgatgtgttaaaagtatcaaataaaaactatgtgtataaccaaatgcaacagtatttggaaaatttagtgttattccagtcaagcgctgatttatcaaagaaatttggtacgaaaaaagagccaaacttagatacgtctaaaggtacgatatatgacaatatcacatcgccagtcaacttatacgttatggaatatggtgactttattaactttatggataaaatgagtgcatatccatggattacacaaaactttcaaaaggttcaaatgttacctaaagattttattaatacaaaagatttagaggacgttaagacaagtgaaaaaattactggattaaagacattaaaacagggtggaaaatcaaaagaatggagtttaaacgatttatcattaagtttcacaaagcttcaagagatgatgttgtctaaaaaagacgagtttaaacatatgatacgtaatgagtacatgacgattgaattttatgactggaacggtaacacaatgttacttgacgctggtaaaatttcacaaaaaacaggtgttaagttacgtacaaaatccatcattggttatcataatgaagtgcgagtatatccagttgattataacagtgctgaaaacgatagaccgatacttgctaaaaataaagatatattaattgatacaggttcattcttaaataccaatataacatttaatagttttgcgcaagtgcctatattaattaataacggaattttaggacaatcacaacaagccaatagacagcgtaatgcagaaagtcaattaatcacaagtcgtatagataatgtattaaatggtagtgacccaaaatcacgtttttatgacgctgtaagtgtagcaagtaatttaagtccaaccgctttatttggtaagtttaatgaagaatataatttctacaaacaacaacaggcagaatataaagatttagccttacaaccaccatctgtgacagaatcagaaatgggaaacgcattccaaattgcaaatagcattaacggtttaacgatgaaaattagtgtaccgtcacctaaagaaattacatttttacaaaaatattatatgttgtttggttttgaagtaaatgactataatacattcattgaacctattaacagcatgactgtatgcaactatttaaaatgtacaggtacgtataccatacgtgacattgaccctatgttaatggaacaattaaaagcaattttagaatctggtgtgagattttggcataatgacggttcaggtaatccaatgttacagaacccgttaaataataaatttagagaaggtgtataaaatgaatgaggtaaaattaagatttacggacacagaagcatttcatatgttcatatatgcaggtgatttaaagttactatattttttatttgttttgatgattatagatgttgttactggttttgctaaagcaattaaaaataataatctatggtctaaaaaatcaatgaaaggttttgctaaaaaattattgatattctgtattatcattttagctaacatcattgaccagattttacaattaaaaggtggtttactcatgattacgattttctattatatcgcaaatgagggactatctattgttgaaaattgtgctgaaatggacgtattagtgcctgaacaaattaaagataaattaagagtaattaaaaacgattctgaaaagggtgataataatgaacgaccaagagaagatagataaatttacgcattcgtatattaatgatgatttcggtttaacgatagaccagttagtccctaaagtaaaagggtatggacgctttaatgtatggctaggtggtaatgaaagtaaaatcagacaagtattaaaagcagtaaaagagataggtgtgtcacctactctttttgctgtatatgaaaaaaatgaagggtatagcgctggtttaggttggttgaaccatacatctgcacgaggtgactatttaacagacgctaaattcattgcaagaaaattagtatcacaatcaaaacaagcaggacaaccgtcttggtatgacgcaggtaacatcgttcactttgtacctcaagacgtacaaagaaaaggtaatgcagattttgctaaaaatatgaaagcaggtacaatcggacgtgcgtatattccattaacagcagcggctacttgggcggcatattatcccctaggtttgaaagcgtcatataataaagtacaaaactatggtaatccttttttagacggtgcaaatactattttagcatggggtggtaaattagacggtaaaggtggttcacctagtgattcgtctgacagtggtagtagtggtgacagtggtagttcactgctcgctttagcaaaacaagccatgcaagaattattaaaaaaagtacaagacgcattacaatgggatgtacacagtattggtagtgataaattttttagtaatgattattttacattacaaaaaacatttaacaacacatatcatattaaaatgacgattgggctacttgattcattaaaaaaactgattgatagtgtgcaagtagatagtggggatagtagttcaaaccctactgatgatgacggggaccataaaccaattagtggtaagtcagtcaaaccaaatggtaaaagtggacgcgtcattggtggtaactggacgtatgcacagttaccagaaaaatataaaaaagcaattggtgtacctttattcaaaaaagaatacttgtacaaaccaggtaacatatttcctcaaacgggtaatgcaggacaatgtacagaattaacatgggcatatatgtcacaattacatggtaaaagacaaccaacagacgacggtcaaataacaaacggtcaacgtgtgtggtacgtatataaaaagttaggtgcaaaaacaacacataatccaacagtagggtatggtttttcaagtaaaccaccatacttacaagcaacagcatatggcattggtcacacaggtgtcgttgtagcagtatttgacgatggttcattcttagtagcaaactataacgtcccaccatacgtggcaccgtcacgggttgtattatatacattgattaatggtgtacctcataacgctggtgataatattgtattcttcagtggtattgcttaattaactatgctataatgaaaacatgctagtaatgctagtaaataaaatacaaaacataatcaattttcgtacacatttttcatgttatatcaaaagaaaaaggcgactgttatttaacagttgcctttttttaattcatcgtgttcacgttttaatatatgcaaattagatttattatgcactgaacgtacaactggaaataagtcattaagtgagaatgaaccgatgtcactttcaatataaagaatatcatcaaattgactatggtcaaaattttctctagcgtcttttaagataaattcacgtttcatattaagttcatcagtaaaatattcatcatatacattaccgcatacaatttctgttttagacggataaatcgatatcgtaccctgttcgttatagatacttttattgttttctattatcacaccgtcaaagaattgttcacgtacaaaggtttcaaaatcgacgcttgtatcaaaggcgcttttcggtataccagcagaagcaattttaatctttccattcacttcatatgcatattttttatgattcagtacaaacatcttatctatctgttcgttttcaatatcccatttacctaaggctatcgggtcgaataaactggggttcaataagggtttaacaacggatttcatatacaaactatcagtatcgcaataaataaaattgtcgtcaatttcattttcagttaagtattggaaaggtaccaataagttatataatgaacgtgatgtgacaaatgtagagaataatatattacgttcagtgtttttgtaaccgttaatgatattatatagttcgttgttatcatctaaacggaataagttaaaatgtgaacgtaatgcaggtatgccatataatccgttaagtacaactttagacaacataacctcctcatttgagtaagggtgttcgttgatgtcatcagtaatatgatagtcgtaaggtgatgtcatgttgattttgttttttaacttaccttgtgttttaataaaatagttttgaaatataatatcacgtgcatgaaagtattcacattcatatatcacaaacgaattaacacgtatatgcgtgcaatcaatacccgtaatgtcttgaatcattcttaatgtatttgtattaatattaacgtaatcattatcattattatagtattttacaatcatttgacgtaatacacgtgatttgattttaattaataaatcattgttaaatacatctttatcaatcttatataatgaaaaataattgtcatcatctaaaaaagtagggattaatgtaggttctgaataatgttcataaaagtataaccatgtcggaattttctcatgatacatcacataaggataactggaattgatatcaatagaaaaacaaggctcatcaataagtttgtttatgtatttagtgttatacatatttaaaccaccacgataaaatgatttgatataatcataaaaattcatatcatggaaatgataatgtgtatatgatattttaatatcttgatattgattgagtaactgaaaacgcgtcatttgattatttaaatacgattccataatattcaatgaaaatgttaatttgttatagtcaaaatttggaaatatatcactataatgaatatggcacatacctaatataataacgtcattatgaatgtatgtaagttgttcaggtgtgagtttagcaaaacactttacggcatagtcataggcttcactatctgacatgtcgttatctttatcaaatatcgtgtaattaaaatctgttttaagttggtcgtctgttaaataaccaccgtcaagcaactttttacctaatgttgcaattgatgtatttgttttcataaagttatcaataatattaaatttaaatccatttaaaaacattgttaagtctaaattaatagacgatttcacacgtttttctaaaatcacattttgatttttagctaaaatagtagcctcttgcatctttagtgtgtgttcgttttcttctgcagattttaaatatatattttcacgtgtgatattatcaaaataacgcatggtatctttaagtaaaaaatggttgtcatacttattacagttatgtgcaatcatgataatatctgtttttgacttagtgattgtatcacgtcgtttcacatacgtataaaatgcgtcataaaacgattcaaaactaggaaatacttctacatcaatctcataaccattaaaccaaccaattgctactgaatacgttacgtttttatatttggttggtttttttcgtccgttaactttattgtacgctaatgtttctatatcccagtataaaatcattcgacgttcatgtttatgatattgcatgcattctagtaatcccataatcttacacaccttttataagccgtattgtttcattaaatacttctttgtattttcaatatagttatcttcatatattttttcttttctttcaaattcactcatatttttcttcatttcattttttatatgaaattttataattttattcatatctaaatataaatatctatcattatcaacaacgtaattttttgagtaagcgttatcaaaatgtaaattgcttggattgtaataataacgctccatgttttctttataaaacatatcttctcttaaataaataacattgtcatctatatctttgattttagtacaaaattcatattgttttgtataaggtataacaataatattagcattaaatgtatcaacattatacataatttttatatatttatcgtcagttttaatatagaaaaaatcaccgttttgattgatatgatttcttaaattatcatctgccaaattatattcgttaaattcaaactcgccagtagtcatagcgtcatcgtttgaattgaatgcccgtgtgttacgcttttcatttacgtaatcgtttcttcgcatttctaaaaaaatgtttttgtaaagtcgtgatgtgttcattttatgtttttgtaataagttatatatatttaaattggataatataggacttgaaaagttgactgcattacctagtaaaaacattttaggaaagccaatataatcaacattaccatggttacggtcgattgattcataaattgtttttaacttatcccactcgtcaattaaatagtcatcttcaagtgctaaaaattcatcatatataatgatagggtagtgttttaaaaagttagaatgatattttaaatcagttgcactattcaaatctgtaatcacaccgatttccttatcttgatagatgatagctaaatagtccctagcgcttctgaatgtgacacgcttagatttgaatagtgggtttttgtctatgatttcctcaataaaatcacgataagcgtcacgtaatgtataatgacgtgataataaagtaaatttaatatcaagttttatagctaaataaataaagaatgaaacatagttgaacgattttccgtcagaacggtttgaaatagatatgtaatagtctatatcatcattcatgagttcatcaactaattctatttgattatagttatctggtattttttttctgacatgattgacagcattttgataatctcttaccatgtctaaacgattttgtttcaccatgtttttgctccttataatagtttatgatgtcgtttacagtattaaaattactcttcaaatgttgcataatataaaaagttatacctcacatctttatcatcaatagtagtcactggtctgtctgatttaccaatttctttgtataaagtgtcaatttctttaatatatttatacatagaagaattattatttttagcttgtaattcatataaagcatatttatgttttttagcgtttttattattagattcatctttacggttatatatttcaagtatatagtttaattgttcatgtcttttacctcttaccaatgatacggcatttgcatatgacacgtttctttcttttggaaaatagggcaaatgtgcgaaatgtttccatgtgtctatgtacgcctcttgtaaatctttatcatcaaatttaaaattaacagtactaaaatcatttaaaaacaattctttttcctgctcttttcttgcgtctctttcttttttccatttatccatttcggacgtatgtctaaccattgctaacgacctccatataacccatatataaccactaaaaagataatgtagaatataatcaatgtagtaaataaaacaccaaatgacacacgtatatgcattgtcataagtattacaagtgtaattaaaaatgctaaaaggaaaataatagctatgtttaatatattagtcatgttctatcacgttcccgttattatatatcactttgttttgaaaaattattgttatattactttctattggtttctcgaaatattctaatacgtcatcaatagtacaatccataaaaacttcttttttatataatgggtttaaatgttctcgataaaaaacctcaagacaactaaaactatatgtacgaacatcaacgtcaatgtctaaagtaaataaatcattgtattttgtatcactatcatagtattcaatagaaatttcaccgtatctaacaaaaacaacacattttccacttagtgattcaaattttgttattttattcataaaacaatctctattatctaaaatataattaattaatttttttgtgtttaatattgttgtaatattcattttatatctccttaatgtattttacacaaagattatatgcaccttttttgtaaaagtttgcgtcaaaataactatatattaccttaactttatttattttttcgaattgttcaatttcatgttcatatgtttcattaattgatacattgtataataatacggcagtgtatattttttccattgtttagcacctcataaaaataggggataaatatcccctataaaattgtattaaaatgatactggaccaaagttgattgagtaacctttttgaccttttttgttttcatattcataaattgtaaattgcacttcaccagcattgataatgttaacaacgtcctcgtcttgacgcatgtctttaattaattcagttaagtgattcggtaagtttacgttatagtcgtcagtgacgataacaccttgttcaccgaattttgattctttgtttgtgaataatgctctaacgatatactcttttttcataccgtatttttctactaattctgatagtttaataaattctctttctttttcctcaaattcaaatctcgctaatgtgttttggtgtcttgataaaatatcttttacgtttgtcatttttatttctcctcttatttaaattatttgctttctggaattgaaatttgtagtaaatcattgtaataaacttgaattgttttcgttgtgcgtgtagtggataaaagtttgtgtgaattaggtaataaatcttttgcttgtgtttttgataaatgatactcatgaagtggaataaattcttcaacatattcatttttatcatctaaatagtgaagaatataacctttaattcgtaatgtaacaatatcatcaggtttcattattatatcactcctttctaaaaaacgtaaacgttatacgtttcataaaatcctttgtgcatattccattgttctattgggtcatcaccagcaatgtaagataaaatagattctggtttagtttcgttgtttagttcatcatttaagaattgaacaacagaactattatagtttaataatagttgttggcaagccgatactaagttaattgcattgtcgaaagtataagctggattccattgaataagtttattgaatagttgcaacatttcagtatatgcttgacctttttctgcaggtgcattatcaacattaaccattattatcactccttaaatcattgatttcattccttaattcatcaacgatttttttaggtgaattatggtctaattgttcaaaatcgtccttttcaagtacaaataatgttaattcataagttgatgtattacccataacaataactatattaccattttttaaaatgtaagtttgtaaaggttgtacattttccattttgttacctccttgatttgattacatacatagtatagcaaacgtttaaaagttttgtcaatggtttttcttaaaaagtttaaataatttaaaaatactatttaatagaagaaattagattttaaatacaaatcataattttgaataaaagtcaatagatacatatattttgtattttatgaatatgttataggtttgataagttggaaaagtagaagcacagtttttataagtttagtaaagaaatgataagttaatttataagttttgatttgtataatcgtttattttaaacggtggggaggtgtaatt

SEQ ID NO: 125 - DNA, 18081 bp, Rosenblumvirus sp.
  source 1..18081: mol_type = genomic DNA
aaattacacctccccaccgtttaaaataaacgattatacaaatcaaaacttataaattcacttatcatttctttactaaacttataaaaactgtacgtctacttttccaacttatctaacctataacatattcatcaaatacaaaatttatgtatctattgacttttatcaaaatttatgatttgaacttaaaataattttaatttacttatttaaatattctatgatataataagatataaaatatttggaggtgtgtattaatgactgaatttgaagaaattataaaacctgacgagaaagaagattcttcagaatcaactgaagaatcaactgaagaatcaacagaagaaactgaagaatcgtctgaaagtgaatcagtagaaacaattgaagaagaaaatgaaaacaaattagaacctactattactgatgaagatagtgcaaaattagaccctgttgttttagaacaacgtatcgcttcattagaacaacgatttactaattttgaaacatcacaaatgcaacaaccacaaccacaaccacaaccacaaccagatgttactgaagcagatgacaacgacaaagattattcagatgaagaattagtggataagttagatttagattaggaggaatttaaacatgtatgagggtaacaatatgcgttctatgatgggcacatcatatgaagattcaagattaaataaacgaacagaattaaatgaaaatatgtcaattgatacaaacaaaagtgaagatagttatggtgtacaaattcattcactttcaaaacagtcattcactggcgatgtagaggaggaataataaatcatggcagaaaagagtacaaaaaacgaaacagcactattagttgcacagtcagctaaatctgcattacaagactttaatcatacttattcaaaatcatggacgtttggcgataagtgggataattctaatacaatgtttgaaacatttgtaaataaatttttattccctaagattaatgaaacgttattaatcgatattgcattaggtaatcgttttaattggttagctaaagagcaggactttattggtcaatacagtgaagaatatgtaattatggacacagtacctattaacatggatttatctaaaaatgaagaattaatgttaaaacgtaattatccacgtatggctactaagttatatggtagtggtattgtgaagaaacaaaaattcacattaaataacaatgatacacgctttaatttccaaacattagcagacgcaactaattatgcattaggtgtctataaaaagaaaatttctgatattaacgtattagaagaaaaagaaatgcgtgcaatgttagttgattattcattgaatcaattatctgaatcaaatgtacgtaaagcaacatcaaaagaagatttagcaagtaaagtttttgaagctattcttaacttacaaaacaacagtgctaaatataatgaagttcatcgtgcttcaggtggcgctattggacaatatacaacagtttcaaaattaaaagatattgttatattaacgactgatagcttaaaatcttatcttttagatacaaagattgcgaacacgttccaagtagcagggattgactttacagaccacgttattagttttgatgatttaggtggagtttttaaagttactaaagatattgtcgtatcaagtgacgaatcagttaatttcttacgtgcttacggtgattatcaaactcataaaggtgatacaattccagttggttcagtattcacttatgatgtttcaaatttatctgaatttaagtctaacgttgaagaaattaaaccaaaatcagatttatacgcttttattttggatattaattcaattaaatataaacgttacacaaaaggaatgttaaaacaaccattctataatggtgaatttgatgaagttacacactggattcattactattcatttaaagccattagcccattctttaacaaaattttaattactgaccaagatgtaacaccgagaacagaataatagaggtgatataaatgactaaacataataaaggcgtacaggttgaattatctaaagaaatcaataaacgtgttgtagaacatcgcaacagatttaaacgtcttatgtttaatcgttatttggaatttttacccctattaataaactataccaatcgtgatacggttggtatagattttattcaattagaatctgcattaaggcaaaacattaatgttgttgttggtaaagcaagaaatgaacaaattatgattttgggctatgttaacaacacttattttaatcaagccccaaacttttcatcaaatttcaattttcaatttcaaaaacgattaacaaaagatgatatttatttcattgttccagactatttaataccagatgaatgcttacagattcataaaatatatgataactgtatgagtggtaattttgttgtaatgcaaaataaaccaattcaatataatagtgatatagaaattatagaacattatactgatgaattatctgaggttgttttatctagattctcattaattatgcaagcaaaatttagcaaaatatttaaatcagacattaatgatgagtcagttaatcaacttgtatcggaaatatacaacggtgcaccatttgttaaaatgtcacctatgtttaacgccgatgatgatatcatagatttaaccagtaatagtgtgattccagcactaactgagatgaaacgtgaataccaaaataaaattagtgaattaagtaactatttaggtattaattcactagcagtggataaggaaagcggtgtttctgacgaagaggcaaaaagcaaccgaggttttaccacatcaaatagtaatatttatttaaaaggtcgtgaacctattacattcttatcaaaacgatatggtttagatattaaaccgtattacgacgatgaagttacatcagaaatcacaatgatagatacattgtctaatgatgaaagtagtgaatacaatggctagatatacaatgactttatttgattttattaaatcagaattaattaaaaaaggttttaatgaatttgtaaataatgataaattaacgttttatgatgatgaatttcaattcatgcaaaaaatgttgaagtttgacaaagacgttttagccatcgttaatgaaaaagtgtttaaaggttttaaacttaaagatgacttatctgacttactttttaaaaaatcatttacaatacactttttagatagagaaatcaacagacaaacagttgaagcttttggcatgcaagtgattactgtatgtatcacacatgaggattatttgaatgtggtttattcatcaagtgaagtagaaaaatatcttcaatcacaaggcttcacagaacacaacgaagatacaataagcaacactgatgaaacttcaaatcaaaatgcaacatctttagacaattcaactggcatgacagcaaacagaaatgcttatgtgtcattaccacaaagcgaggttaacatagatgtagataacacaacgttacgatttgcagataataatacaattgacaacggtaaaactgtgaataaatcaagtaacgaaagtaatcaaaacgcaaaacgtaatcaaaatcaaaaaggtaatgcgaaaggtacacaattttcaaaacagtatttaattgataatattgataaagtatacgatttaagaaagaaaattttaaatgaatttgataaaaaatgttttttacaaatttggtaaaggtggaaaattatggcatataatgaaaacgattttaaatattttgacgacattcgtccatttttagacgaaatatataaaacgagagaacgttacacaccgttttacgatgatagagcagattataataccaattcaaaatcatattatgattatatttcaagattatcaaagctcattgaagtattagcacatcgtatttgggactatgacggtgagttaaaaaaacgttttagaaactgggacgatttaatgaaagcattcccagaccaagcgaaagacttatttagaggttggttaaacgacggtacaatagataaaattattcatgatgaatttactaaatatagtactggtcttacatctgcatttgcattatttaaagttgcagaaatgaaacaaatgaatgattttaaagcagaagttaaagacttaattaaagacattgaccgttttgttaatggttttgaattaaatgagcttgaaccaaagtttgttatgggattcggtggtattcgtaatgctgttaaccaatctataaacatagataaagaaacgaatcaaatgtactctacacaatcagattcacaaaacccagaaggtttttggattaataaattaacgcctagcggtgacttaatttctagtatgcgtattgtacaaggtggtcacggtactacaataggtttagaaagacaatctaacggtgaaatgaaaatatggttacatcatgacggtgtagcaaaactgttacaagtcgcatataaagataattatattttagatttagaagaggctaaagggttaacagattatacaccacagtcacttttaaacaaacacacgtttacaccgttaattgatgaagaaaatgacaaaatcgttttaagattcggtgacgggacaatacaggtacgttcaagagctgacgtaaaaaatcacattgataatgtagaaaaagaaatgacgattgataattcagaaaacaatgataatcgatggatgcaagggattgccgttgatggtgatgatttatactggttaagtggtaacagttcagttaattcacacgttcaaattggtaaatattcattaacaactggtcaaaagatttatgattatccgtttaaattatcatatcaagacggtattaattttccacgtgataactttaaagagccggagggtatttgtatttataccaatccaaaaacaaaacgtaaatcgttattacttgctatgactaatggcggtggtggaaaacgattcaataatttatatgggttctttcaacttggtgagtatgaacactttgaagcattacgtgcgagaggttcacaaaactataaattaacaaaagacgatggacgtgcgttatcaattccagaccatattgacgacttaaatgacttaacacaagcagggttctattatattgacggtggtacagctagtaaacttaaaaatatgccaatgaatggtagtaaaaaaattatagacgctggttgtttcatcaatgtataccctacaacacaaacattaggtacagtacaagaattaacgcgtttttctactggtcgaaaaatggttaaaatcatgcgtggtatgacgctcgatgtatttacattaaaatgggattatggtttatggacaacaatcaaaacagacgcaccatatcaagagtatttagaagcaagtcaatacaataactggatagcttacgttacgacacctggtgaatattatattactggtaaccaaatggaattgtttagagacgcaccagaagaaattaaaaaagtgggtgcatggttacgtgtttcaagtggtaacgctgtcggtgaagtaagacaaacattagaggctaatgtgtccgaacataaagaattctttagtaacgttaatgcagatacaaaaaaacgtcaatatagttgggtcaagaaaggataatgtttcatgaaatcacaacaacaagcaaaagaatggatatataagcatgagggtgttggagttgactttgatggagtatatggttttcaatgtatggacttagcagttgcttatgtttattacattactgacggtaaagttcgcatgtggggtaatgccaaagacgccattaacaacgactttaaaggtttagcagcggtgtatgaaaatacacctagctttaaacctcaattatgtgacgttgctgtatacactaattctcaatatgggcatattcaatgtgtaacaagtggaaatcttgattattatacatgcttagaacaaaactggttaaatggtggatatgatggttgggaaaaagcaacaataagaacacattattatgacggtgttacgcattttattcgtccaaaattttcaaatagtgatagtaaagtattagaaaaaaatattcaacaaactaacaactggaaacaaaaccaatacggcacatattacagaaatgaaaatgctacatttacatgtggttttttaccaatatttgctcgtgtcggtagtccgaaattatctgagcttaatggctattggttccaaccaaacggctatacaccatatgacgaagtttgtttatcagacgggtatgtatggattggttacaattgggaaggtacacgttattatttaccagtgagacaatggaacggtaaaacaggtaatagttacagtgttggtattccttggggggtgttctcataatgggtattttaggttttttctttgagtttagttggaaacgatacaaataagaggtgtgaacaatggctgatagaatcgtaagaagtttaagacaagttgaaacaatagacaggttagcagattttttaacagaagaaaatgacttaatcagtacatcagacggacatatttatgtccgtactgatactggttattataaattaacattttataatgatttaaaaacattgattaataaatacagtggtcaaatagaaaatcatgatattgcaattaatgataataaagagaaaatatcaacatttctagagaaaataaaaaaattccaaccaatgattgatagtaataaaaaagagattgattcattaaaagaaaaagatgtcatattaaatgaaagtttagaacaacatcaaacacaattaaatgaatttgaaaaatcaatgttacagtatgatgataaatatgaaacacttacacaatcgttaaacgctactaaagatagtgtaggacgaaacacaaatgaaattaatttaattaaagctaatactggtgcagaaaacattgacgcgttaaaaagagaattagctgaagttaaaaaaagtatcaatcttgataaaataaaagatattgaacaacagattgaattattaaaatctaaacaaaacaatgacaacacaattcaagaaatacaagaggatattaataagttaaaacaaaattcaagtgctgggaaacttgaaagtttagaacaaaccattaatgacatcaaagcaaatgccaaccttgataagataaaagagttagaaacaaaattaaacagtattaaccaaaaagattatacacaggatattaattcaattaaatctgacatcgctgctttaaaaacaaataatgataaaatatcaaaaattgaaaaagatattcaagaattaaaagatagaccagttgttgacggaaacggacatattgatttatcaaaatatgataatgatattaatgatttaaaacaaaaaacatcaacaaatgaatcaagtattaacactttatcaacaagagtggacaacttaaatatagatactaaaattgcacaatctaaatcagaaattgaacaaaattttgatcaaaaaatcaacagtgcaaaattacaatttaatgatacaggttggcaagatatattgctagaaagtggtatagttgcaagtgatagcaacggtggttatcccgcaccgcaatatcgtattgtaacaattaatggtgttaaaaccatacaattaaaaggggtattaaaagggattaagaaaaacggtgatattaaattaggtacgattaacgctaacttaaaatcaacacatcactacacacaaagtgcgattgattcgaaaatgattaatacaagattatatttaaactttaataatgaattacattttgttacatcaaattatagcgatagtgacttaacaaatggagataaacgttttgcaatagatacacaaatcattgaataaaaatgttataatagtcgtataaattatttatacgactattttttatggaggtaaaaatgagaaaattaacaaattttaaatttttctataacacaccgtttacagactatcaaaatacaattcattttaatagtaataaagagcgtgatgattattttttaaacggtcgtcattttaaatcattagactattccaaacaaccgtataattttatacgtgatagaatggaaatcaatgttgatatgcagtggcatgacgcacaagggattaactacatgacgtttttatcagattttgaggacagacgctattacgcttttgtgaatcaaatcgaatatgtgaatgatgttgtggtaaaaatatattttgtgattgatactattatgacgtatacacaaggtaatgtattagaacaactttcaaacgttaatattgaacgtcaacacttatcaaagcgtacgtataactatatgttgccgatgttacgtaacaatgatgatgtgttaaaagtatcaaataaaaactatgtgtataaccaaatgcaacagtatttggaaaatttagtgttattccagtcaagcgctgatttatcaaagaaatttggtacgaaaaaagagccaaacttagatacgtctaaaggtacgatatatgacaatatcacatcgccagtcaacttatacgttatggaatatggtgactttattaactttatggataaaatgagtgcatatccatggattacacaaaactttcaaaaggttcaaatgttacctaaagattttattaatacaaaagatttagaggacgttaagacaagtgaaaaaattactggattaaagacattaaaacagggtggaaaatcaaaagaatggagtttaaacgatttatcattaagtttcacaaagcttcaagagatgatgttgtctaaaaaagacgagtttaaacatatgatacgtaatgagtacatgacgattgaattttatgactggaacggtaacacaatgttacttgacgctggtaaaatttcacaaaaaacaggtgttaagttacgtacaaaatccatcattggttatcataatgaagtgcgagtatatccagttgattataacagtgctgaaaacgatagaccgatacttgctaaaaataaagatatattaattgatacaggttcattcttaaataccaatataacatttaatagttttgcgcaagtgcctatattaattaataacggaattttaggacaatcacaacaagccaatagacagcgtaatgcagaaagtcaattaatcacaagtcgtatagataatgtattaaatggtagtgacccaaaatcacgtttttatgacgctgtaagtgtagcaagtaatttaagtccgactgctttatttggtaagtttaatgaagaatataatttctacaaacaacaacaagcagaatataaagatttagcattacaaccaccgtcagtgacagagtcggaaatgggcaacgcattccaaattgcaaacagtattaacggtttaacgatgaaaattagtgtaccgtcacctaaagaaattacatttttacaaaaatattatatgttgtttggttttgaagtgaatgactataattcatttattgaaccaattaacagtatgactgtttgcaactatttaaaatgtacaggtacgtataccatacgtgacattgaccccatgttaatggaacaattaaaagcaattttagaatctggtgtgagattttggcataatgacggttcaggtaatccaatgttacagaacccgttaaataataaatttagagaaggtgtataaaatgaatgaggtaaaattaagatttacggacacagaagcatttcatatgttcatatatgcaggtgatttaaagttactatattttttatttgttttgatgattatagatgttgttactggttttgctaaagcaattaaaaataataatctatggtctaaaaaatcaatgaaaggttttgctaaaaaattattgatattctgtattatcattttagctaacatcattgaccagattttacaattaaaaggtggcttactcatgattacgattttctattatatcgctaatgagggcttatctatcgtagaaaattgtgcagaaatggacgtattagtaccagaacaaattaaagataaattaagagtaattaaaaacgattctgaaaagggtgataataatgaacgaccaagagaagatagataaatttacgcattcgtatattaatgatgatttcggtttaacgatagaccagttagtccctaaagtaaaagggtatggacgctttaatgtatggctaggtggtaatgaaagtaaaatcagacaagtattaaaagcagtaaaagagataggtgtgtcacctactctttttgctgtatatgaaaaaaatgaagggtatagcgcgggtttaggttggttgaaccatacatctgcacgaggtgactatttaacagacgctaaattcattgcaagaaaattagtatcacaatcaaaacaagcaggacaaccgtcttggtatgattacggtaatccagtgcattttgtaccgcaagacgtacaaagaaaaggtaatgcagattttgctaaaaatatgaaagcaggtacaatcggacgtgcgtatattccattaacagcagcggctacttgggcggcatattatcccctaggtttgaaagcgtcatataataaagtacaaaactatggtaatccttttttagacggtgcgaatactattcttgcgtggggtggtaaattagacggtaaaggtggttcacctagtgattcgtctgacagtggtagtagtggtgacagtggtagttcactgctcgctttagcaaaacaagccatgcaagaattattaaaaaaagtacaagacgcattacaatgggatgtacacagtataggtagcgacaaattttttagtaatgattattttacattacaaaaaacatttaacaacacatatcatattaaaatgacgattgggctactcgattcattaaaaaaactgattgatagcgtgcaagtagatagtgggggtagtagttcaaaccctactgatgatgacggagaccataaaccaattagtggtaaatcagtcaaacctaatggtaaaagtggtcgcgtcattggtggtaactggacatacgcacagttaccagaaaaatataaaaaagcaattggtgtacctttattcaaaaaagaatatttatacaaaccaggtaacatatttcctcaaacgggtaatgcaggtcagtgtacagaattaacatgggcgtatatgtcacaattacatggtaaaagacaaccgacagacgacggtcaagtgacaaacggtcaacgtgtatggtacgtctataaaaagttaggtgcaaaaacaacacacaaccctactgttggttatggtttttcaagtaaaccaccatacttacaagcaacagcatatggcattggtcacacaggtgtcgttgtagcagtatttgacgatggttcattcttagtagcaaactataacgtaccaccatacgtcgcaccgtcacgggttgtattatatacattgattaatggtgtacctcataacgctggtgataatattgtattcttcagtggtattgcttaattaactatgctataatgaacacatgctagtaatgctagtaaataaaatacaaaacataatcaattttcgtacacatttttcatgttatctcaaaagaaaaaggcaactgttatttaacagttgcctttttttaattcatcatgttcgcgttttaatatatgcaaatcagatttgttatgaactgaacgttcaacaggaaataagtcgttaagtgaaaacgaaccaatgtcactttcaatataaagaatatcatcaaattgactatggtcaaaattttctctagcgtcttttaatataaattcacgtttcatattaagttcatcagaaaaatattcatcatatacattaccacatacaatttctgttttagacggataaatcgatattgtaccctgttcattatagatacttttattgttttctataatcgcaccgtcaaagaattgttcacgtacaaaggtttcaaaatcgacgcttgtatcaaaggcgcttttaggtataccagcagaagcaattttaatctttccattcacttcatatgcatattttttatgattcagtacaaacatcttatctatctgttcgttttcaatatcccatttacctaaggctatcgggtcgaataaactggggttcaataagggtttaacaacggatttcatatacaaactatcagtatcacaataaataaaattgtcgtcaatttcactttccgttaagtattggaatggtactaataagttatacaatgaacgtgatgttacaaatgtagaaaataaaatattacgttctgtgtttttgtaaccgttaataatattgtatagttcattgttatcatctaaacggaataagttaaaatgtgaacgtaatgcaggtatgccatataatccgttaagtacaactttagacaacataacctcctcatttgagtaagggtgttcgttgatgtcatcagtaatatgatagtcgtaaggtgatgtcatgttgattttgttttttaacttaccttgtgttttaataaaatagttttgaaatataatatcacgtgcatgaaagtattcacattcatatatcacaaacgaattaacacgtatatgcgtgcaatcaatacccgtaatgtcttgaattattcttaatgtatttgtattaatattaacgtaatcattatcattattatagtattttacaatcatttgacgtaatacacgtgatttgattttaattaataaatcattgttaaatacatctttatcaatcttatataatgaaaaataattgtcatcatctaaaaaagtagggattaatgtaggttctgaataatgttcataaaagtataaccatgtcggaattttctcatgatacatcacataaggataactggaattgatatcaatagaaaaacaaggctcatcaataagtttgtttatgtatttagtgttatacatatttaaaccaccacgataaaatgatttgatatagtcataaaaattcatatcatggaaatggtaatgtgtatatgatattttaatatcttgatattgattgagtaactgaaaacgcgtcatttgattatttaaatacgattccataatattcaatgaaaatgttaatttgttatagtcaaaatttggaaatatatcactataatgaatatggcacatacctaatataatcacgtcattatgaatgtatgtaagttgttcaggtgtgagtttagcaaaacacttaacagcatagtcataggcttcactatctgacatatcgttatctttatcaaatatcgtgtaattaaaatctgttttaagttggtcgtctgttaaataaccaccgtcaagcaactttttacctaatgttgcaattgatgtattggttttcataaagttatcaataatattaaatttaaatccatttaaaaacattgttaagtctaaattaatagacgatttcacacgtttttctaaaatcacattttgatttttagctaaaatagtagcctcttgcatctttagtgtgtgttcgttttcttctgcagattttaaatatatattttcgcgtgtgatattatcaaaataacgcatggtatctttaagtaaaaaatggttgtcatacttattacagttatgtgcaatcatgataatatctgtttttgacttagtgattgtatcacgtcgtttcacatacgtataaaatgcgtcataaaacgattcaaaactaggaaatacttctacatcaatctcataaccattaaaccaaccaattgctactgaatacgttacgtttttatatttggttggtttttttcgtccgttaactttattgtacgctaatgtttctatatcccagtataaaatcattcgacgttcatgtttatgatattgcatgcattctagtaatcccataatcttacacaccttttataagccgtattgtttcattaaatacttctttgtattttcaatatagttatcttcatatattttttcttttctttcaaattcactcatatttttcttcatttcattttttatatgaaattttataattttattcatatctaaatataaatatctatcattatcaacaacgtaattttttgagtaagcgttatcaaaatgtaaattgcttggattgtaataataacgctccatgttttctttataaaacatatcttctcttaaataaataacattgtcatctatatctttgattttagtacaaaattcatattgttttgtataaggtataacaataatattagcattaaatgtatcaacattatacataatttttatatatttatcgtcagttttaatatagaaaaaatcaccgttttgattgatatgatttcttaaattatcatctgccaaattatattcgttaaattcaaactcgccagtagtcatagcgtcatcgtttgaattgaatgcccgtgtgttacgcttttcatttacgtaatcgtttcttcgcatttctaaaaaaatatttttgtaaagtcgtgatgtgttcattttatgtttttgtaataagttatatatatttaaattggataatataggacttgaaaagttgacagcattacctagtaaaaacattttagggaagccgatataatcaacattaccatggttacggtcgattgattcataaattgtttttaacttatcccactcgtcaattaaatagtcatcttcaagtgctaaaaattcatcatatataatgatagggtagtgttttaaaaagttagaatgatattttaaatcagttgcactattcaaatctgtaatcacaccgatttccttatcttgatagatgatagctaaatagtccctagcgcttctgaatgtgacacgcttagatttgaatagtgggtttttgtctatgatttcctcaataaaatcacgataagcgtcacgtaatgtataatgacgtgataataaagtaaatttaatatcaagttttatagctaaataaataaagaatgaaacatagttgaacgattttccgtcagaacggtttgaaatagatatgtaatagtctatatcatcattcatgagttcatcaactaattctatttgattatagttatctggtattttttttctgacatgattgacagcattttgataatctcttaccatgtctaaacgattttgtttcaccatgtatttgctccttataatagtttatgatgtcgtttacagtattaaaattagtcttcaaatgttgcataatataaaaagttatacctcacatcttcatcatcaatagtagtcactggtctgtctgatttaccaatttctttgtataaagtgtcaatttctttaatatatttatacatagaagaattattatttttagcttgtaattcatataaagcatatttatgttttttagcgtttttattattagattcatctttacggttatatatttcaagtatatagtttaattgttcatgtcttttacctcttaccaatgatacagcatttacatatgacacgtttctttcttttggaaaatagggcaaatgtgcgaaatgtttccatgcgtctatgtacgcctcttgtaaatctttatcatcaaatttaaaattaacagtactaaaatcatttaaaaacaattctttttcctgctcttttcttgcgtctctttcttttttccatttatccatttcggacgtatgtctaaccattgctaacgacctccatataacccatatataaccactaaaaagataatgtagaatataatcaatgtagtaaataaaacaccaaatgacacacgtatatgcattgtcataagtattacaagtgtaattaaaaatgctaaaaggaaaacaatagctatgtttaatatattagtcatgttctatcacgttcccgttattatatatcactttgttttgaaaaattattgttatattactttctattggtttctcgaaatattctaatacgtcatcaatagtacaatccataaaaacttcttttttatataatgggtttaaatgttctcgataaaaaacctcaagacaactaaaactatatgtacgaacatcaacgtcaatgtctaaagtaaataaatcattgtattttgtatcactatcatagtattcaatagaaatttcaccgtatctaacaaaaacaacacattttccacttagtgattcaaattttgttattttattcataaaacaatctctattatctaaaatataattaattaatttttttgtgtttaatattgttgtaatattcatttttatatctccttaatgtattttacacaaagattataagcaccttttttataaaagtttgcatcaaaataactatatattaccttagctttatttattttttcgaattgttcaatttcatgttcatatgtttcattaattgatacattgtataataatacggcagtgtatattttttccattgtttagcacctcataaaaataggggataaatatcccctatgaaattgtattaaaatgatacttgaccaaagttgattgaataacctttttgaccttttttattttcatactcataaattgtgaattgaacttcaccagcattgataatgttaacaacgtcctcgtcttgacgcatgtctttaattaattcagttaagtgattcggtaagtttacgttatagtcgtcagtgacgataacaccttgtacaccgaattttgattctttgtttgtgaataatgctctaacgatatactcttttttcataccgtatttttctactaattctgatagtttgataaattctctttctttttcctcaaattcgaatctcgctaatgtgttttggtgtcttgataaaatatcttttacgtttgtcatttttatttctcctcttatttaaattatttgctttctgcaattgcaatttgtagtaaatcattgtaataaacttgcatagttttagtatgtcgtgtagtggataaaagtttgtgtgtattaggtaataagtctttagcttgtgattttgataaatgatactcgtgaagtgggataaattcttcaacatattcatttttatcatctaaataatgaagaatataaccttttattcgtaatgtaacaatatcatcaggtttcattattatatcactcctttctaaaaaacgtaaacgttatacgtttcataaaatcctttgtgcatattccattgttctattgggtcatcaccagcaatgtaagataaaatagattctggtttagtttcgttgtttagttcatcatttaagaatttaacaacagaactattatagtttaataatagttgttggcaagctgatactaaattaatagcattgtcgaaagtataagctggattccattgaatcaacttattgaatagttgcaacatttcagtataggcttgccctttttcttcaggtgcgttatcaacattaaccattattatcactccttaaatcattgatttcattccttatttcatcaacgatttttttaagtgaattatggtctaattgttcaaaatcatccttttcaagtacaaataatgttaattcataagttgatgtattacccataacaataactatattaccattttttaaaatgtaagtttgtaaaggttgtacattttccatttgttacctccttgatttgattacatacatagtatagcaaacgtttaaaagttttgtcaatggtttttcttaaaaaagtttaaataatttaaaaatactatttaatagaagaaattagattttaaatacaaatcataaattttgataaaagtcaatagatacataaattttgtatttgatgaatatgttataggttagataagttggaaaagtagacgtacagtttttataagtttagtaaagaaatgataagtgaatttataagttttgatttgtataat

SEQ ID NO: 126 - DNA, 18130 bp, Rosenblumvirus sp.
  source 1..18130: mol_type = genomic DNA
aatttacacctccccaccgtttaaaataaacgattatacaaatcaaaacttataaattaacttatcatttctttactaaacttataaaaactgtgcttctacttttccaacttatcaaacctataacatattcataaaatacaaaatatatgtatctattgacttttattcaaaattatgatttgtatttaaaatctaatttcttctattaaatagtatttttaaattatttaaactttttaagaaaaaccattgacaaaacttttaaacgtttgctatactatgtatgtaatcaaatcaaggaggtaacaaaatggaaaatgtacaacctttacaaacttacattttaaaaaatggtaatatagttattgttatgggtaatacatcaacttatgaattaacattatttgtacttgaaaaggacgattttgaacaattagaccataattcacctaaaaaaatcgttgatgaattaaggaatgaaatcaatgatttaaggagtgataataatggttaatgttgataatgcacctgcagaaaaaggtcaagcatatactgaaatgttgcaactattcaataaacttattcaatggaatccagcttatactttcgacaatgcaattaacttagtatcggcttgccaacaactattattaaactataatagttctgttgttcaattcttaaatgatgaactaaacaacgaaactaaaccagaatctattttatcttacattgctggtgatgacccaatagaacaatggaatatgcacaaaggattttatgaaacgtataacgtttacgttttttagaaaggagtgatataataatgaaacctgatgatattgttacattacgaattaaaggttatattcttcactatttagatgataaaaatgaatatgttgaagaatttattccacttcatgagtatcatttatcaaaaacacaagcaaaagatttattacctaattcacacaaacttttatccactacacgcacaacgaaaacaattcaagtttattacaatgatttactacaaatttcaattccagaaagcaaataatttaaataagaggagaaataaaaatgacaaacgtaaaagatattttatcaagacaccaaaacacattagcgagatttgaatttgaggaaaaagaaagagaatttattaaactatcagaattagtagaaaaatacggtatgaaaaaagagtatatcgttagagcattattcacaaacaaagaatcaaaattcggtgaacaaggtgttatcgtcactgacgactataacgtaaacttaccgaatcacttaactgaattaattaaagacatgcgtcaagacgaggacgttgttaacattatcaatgctggtgaagtgcaatttacaatttatgaatatgaaaacaaaaaaggtcaaaaaggttactcaatcaactttggtccagtatcattttaatacaattttataggggatatttatcccctatttttatgaggtgctaaacaatggaaaaaatatacactgccgtattattatacaatgtatcaattaatgaaacatatgaacatgaaattgaacaattcgaaaaaataaataaagttaaggtaatatatagttattttgacgcaaacttttacaaaaaaggtgcatataatctttgtgtaaaatacattaaggagatataaaatgaatattacaacaatattaaacacaaaaaaattaattaattatattttagataatagagattgttttatgaataaaataacaaaatttgaatcactaagtggaaaatgtgttgtttttgttagatacggtgaaatttctattgaatactatgatagtgatacaaaatacaatgatttatttactttagacattgacgttgatgttcgtacatatagttttagttgtcttgaggttttttatcgagaacatttaaacccattatataaaaaagaagtttttatggattgtactattgatgacgtattagaatatttcgagaaaccaatagaaagtaatataacaataatttttcaaaacaaagtgatatataataacgggaacgtgatagaacatgactaatatattaaacatagctattattttccttttagcatttttaattacacttgtaatacttatgacaatgcatatacgtgtgtcatttggtgttttatttactacattgattatattctacattatctttttagtggttatatatgggttatatggaggtcgttagcaatggttagacatacgtccgaaatggataaatggaaaaaagaaagagacgcaagaaaagagcaggaaaaagaattgtttttaaatgattttagtactgttaattttaaatttgatgataaagatttacaagaggcgtacatagacacatggaaacatttcgcacatttgccctattttccaaaagaaagaaacgtgtcatatgcaaatgccgtatcattggtaagaggtaaaagacatgaacaattaaactatatacttgaaatatataaccgtaaagatgaatctaataataaaaacgctaaaaaacataaatatgctttatatgaattacaagctaaaaataataattcttctatgtataaatatattaaagaaattgacactttatacaaagaaattggtaaatcagacagaccagtgactactattgatgataaagatgtgaggtataactttttatattatgcaacatttgaagagtaattttaatactgtaaacgacatcataaactattataaggagcaaaaacatggtgaaacaaaatcgtttagacatggtaagagattatcaaaatgctgtcaatcatgtcagaaaaaaaataccagataactataatcaaatagaattagttgatgaactcatgaatgatgatatagactattacatatctatttcaaaccgttctgacggaaaatcgttcaactatgtttcattctttatttatttagctataaaacttgatattaaatttactttattatcacgtcattatacattacgtgacgcttatcgtgattttattgaggaaatcatagacaaaaacccactattcaaatctaagcgtgtcacattcagaagcgctagggactatttagctatcatctatcaagataaggaaatcggtgtgattacagatttgaatagtgcaactgatttaaaatatcattctaactttttaaaacactaccctatcattatatatgatgaatttttagcacttgaagatgactatttaattgacgagtgggataagttaaaaacaatttatgaatcaatcgaccgtaaccatggtaatgttgattatattggctttcctaaaatgtttttactaggtaatgcagtcaacttttcaagtcctatattatccaatttaaatatatataacttattacaaaaacataaaatgaacacatcacgactttacaaaaacatttttttagaaatgcgaagaaacgattacgtaaatgaaaagcgtaacacacgggcattcaattcaaacgatgacgctatgactactggcgagtttgaatttaacgaatataatttggcagatgataatttaagaaatcatatcaatcaaaacggtgattttttctatattaaaactgacgataaatatataaaaattatgtataatgttgatacatttaatgctaatattattgttataccttatacaaaacaatatgaattttgtactaaaatcaaagatatagatgacaatgttatttatttaagagaagatatgttttataaagaaaacatggagcgttattattacaatccaagcaatttacattttgataacgcttactcaaaaaattacgttgttgataatgatagatatttatatttagatatgaataaaattataaaatttcatataaaaaatgaaatgaagaaaaatatgagtgaatttgaaagaaaagaaaaaatatatgaagataactatattgaaaatacaaagaagtatttaatgaaacaatacggcttataaaaggtgtgtaagattatgggattactagaatgcatgcaatatcataaacatgaacgtcgaatgattttatactgggatatagaaacattagcgtacaataaagttaacggacgaaaaaaaccaaccaaatataaaaacgtaacgtattcagtagcaattggttggtttaatggttatgagattgatgtagaagtatttcctagttttgaatcgttttatgacgcattttatacgtatgtgaaacgacgtgatacaatcactaagtcaaaaacagatattatcatgattgcacataactgtaataagtatgacaaccattttttacttaaagataccatgcgttattttgataatatcacacgtgaaaatatatatttaaaatctgcagaagaaaacgaacacacactaaagatgcaagaggctactattttagctaaaaatcaaaatgtgattttagaaaaacgtgtgaaatcgtctattaatttagacttaacaatgtttttaaatggatttaaatttaatattattgataactttatgaaaacaaatacatcaattgcaacattaggtaaaaagttgcttgacggtggttatttaacagacgaccaacttaaaacagattttaattacacgatatttgataaagataacgacatgtcagatagtgaagcctatgactatgccgtaaagtgttttgctaaactcacacctgaacaacttacatacattcataatgacgttattatattaggtatgtgccatattcattatagtgatatatttccaaattttgactataacaaattaacattttcattgaatattatggaatcgtatttaaataatcaaatgacgcgttttcagttactcaatcaatatcaagatattaaaatatcatatacacattatcatttccatgatatgaatttttatgattatatcaaatcattttatcgtggtggtttaaatatgtataacactaaatacataaacaaacttattgatgagccttgtttttctattgatatcaattccagttatccttatgtgatgtatcatgagaaaattccgacatggttatacttttatgaacattattcagaacctacattaatccctacttttttagatgatgacaattatttttcattatataagattgataaagatgtatttaacaatgatttattaattaaaatcaaatcacgtgtattacgtcaaatgattgtaaaatactataataatgataatgattacgttaatattaatacaaatacattaagaatgattcaagacattacgggtattgattgcacgcatatacgtgttaattcgtttgtgatatatgaatgtgaatactttcatgcacgtgatattatatttcaaaactattttattaaaacacaaggtaagttaaaaaacaaaatcaacatgacatcaccttacgactatcatattactgatgacatcaacgaacacccttactcaaatgaggaggttatgttgtctaaagttgtacttaacggattatatggcatacctgcattacgttcacattttaacttattccgtttagatgataacaacgaactatataatatcattaacggttacaaaaacactgaacgtaatatattattctctacatttgtcacatcacgttcattatataacttattggtacctttccaatacttaactgaaaatgaaattgacgacaattttatttattgcgatactgatagtttgtatatgaaatccgttgttaaacccttattgaaccccagtttattcgacccgatagccttaggtaaatgggatattgaaaacgaacagatagataagatgtttgtactgaatcataaaaaatatgcatatgaagtgaatggaaagattaaaattgcttctgctggtataccgaaaagcgcctttgatacaagcgtcgattttgaaacctttgtacgtgaacaattctttgacggtgtgataatagaaaacaataaaagtatctataacgaacagggtacgatatcgatttatccgtctaaaacagaaattgtatgcggtaatgtatatgatgaatattttactgatgaacttaatatgaaacgtgaatttatcttaaaagacgctagagaaaattttgaccatagtcaatttgatgatattctttatattgaaagtgacatcggttcattctcacttaatgacttatttccagttgtacgttcagtgcataataaatctaatttgcatatattaaaacgtgaacacgatgaattaaaaaaaggcaactgttaaataacagtcgcctttttcttttgatataacatgaaaaatgtgtacgaaaattgattatgttttgtattttatttactagcattactagcatgttttcattatagcatagttaattaagcaataccactgaagaatacaatattatcaccagcgttatgaggtacaccattaatcaatgtatataatacaacccgtgacggtgccacgtatggtgggacgttatagtttgctactaagaatgaaccatcgtcaaatactgctacaacgacacctgtgtgaccaatgccatatgctgttgcttgtaagtatggtggtttacttgaaaaaccataccctactgttggattatgtgttgtttttgcacctaactttttatatacgtaccacacacgttgaccgtttgttatttgaccgtcgtctgttggttgtcttttaccatgtaattgtgacatatatgcccatgttaattctgtacattgtcctgcattacccgtttgaggaaatatgttacctggtttgtacaagtattcttttttgaataaaggtacaccaattgcttttttatatttttctggtaactgtgcatacgtccagttaccaccaatgacgcgtccacttttaccatttggtttgactgacttaccactaattggtttatggtccccgtcatcatcagtagggtttgaactactatccccactatctacttgcacactatcaatcagtttttttaatgaatcaagtagcccaatcgtcattttaatatgatatgtgttgttaaatgttttttgtaatgtaaaataatcattactaaaaaatttatcactaccaatactgtgtacatcccattgtaatgcgtcttgtactttttttaataattcttgcatggcttgttttgctaaagcgagcagtgaactaccactgtcaccactactaccactgtcagacgaatcactaggtgaaccacctttaccgtctaatttaccaccccatgctaaaatagtatttgcaccgtctaaaaaaggattaccatagttttgtactttattatatgacgctttcaaacctaggggataatatgccgcccaagtagccgctgctgttaatggaatatacgcacgtccgattgtacctgctttcatatttttagcaaaatctgcattaccttttctttgtacgtcttgaggtacaaagtgaacgatgttacctgcgtcataccaagacggttgtcctgcttgttttgattgtgatactaattttcttgcaatgaatttagcgtctgttaaatagtcacctcgtgcagatgtatggttcaaccaacctaaaccagcgctatacccttcatttttttcatatacagcaaaaagagtaggtgacacacctatctcttttactgcttttaatacttgtctgattttactttcattaccacctagccatacattaaagcgtccatacccttttactttagggactaactggtctatcgttaaaccgaaatcatcattaatatacgaatgcgtaaatttatctatcttctcttggtcgttcattattatcacccttttcagaatcgtttttaattactcttaatttatctttaatttgttcaggcactaatacgtccatttcagcacaattttcaacaatagatagtccctcatttgcgatataatagaaaatcgtaatcatgagtaaaccaccttttaattgtaaaatctggtcaatgatgttagctaaaatgataatacagaatatcaataattttttagcaaaacctttcattgattttttagaccatagattattatttttaattgctttagcaaaaccagtaacaacatctataatcatcaaaacaaataaaaaatatagtaactttaaatcacctgcatatatgaacatatgaaatgcttctgtgtccgtaaatcttaattttacctcattcattttatacaccttctctaaatttattatttaacgggttctgtaacattggattacctgaaccgtcattatgccaaaatctcacaccagattctaaaattgcttttaattgttccattaacatagggtcaatgtcacgtatggtatacgtacctgtacattttaaatagttgcatacagtcatgctgttaataggttcaatgaatgtattatagtcatttacttcaaaaccaaacaacatataatatttttgtaaaaatgtaatttctttaggtgacggtacactaattttcatcgttaaaccgttaatgctatttgcaatttggaatgcgtttcccatttctgattctgtcacagatggtggttgtaaggctaaatctttatattctgcctgttgttgtttgtagaaattatattcttcattaaacttaccaaataaagcggttggacttaaattacttgctacacttacagcgtcataaaaacgtgattttgggtcactaccatttaatacattatctatacgacttgtgattaattgactttctgcattacgctgtctattggcttgttgtgattgtcctaaaattccgttattaattaatataggcacttgcgcaaaactattaaatgttatattggtatttaagaatgaacctgtatcaattaatatatctttatttttagcaagtatcggtctatcgttttcagcactgttataatcaactggatatactcgcacttcattatgataaccaatgatggattttgtacgtaacttaacacctgttttttgtgaaattttaccagcgtcaagtaacattgtgttaccgttccagtcataaaattcaatcgtcatgtactcattacgtatcatatgtttaaactcgtcttttttagacaacatcatctcttgaagctttgtgaaacttaatgataaatcgtttaaactccattcttttgattttccaccctgttttaatgtctttaatccagtaattttttcacttgtcttaacgtcctctaaatcttttgtattaataaaatctttaggtaacatttgaaccttttgaaagttttgtgtaatccatggatatgcactcattttatccataaagttaataaagtcaccatattccataacgtataagttgactggcgatgtgatattgtcatatatcgtacctttagacgtatctaagtttggctcttttttcgtaccaaatttctttgataaatcagcgcttgactggaataacactaaattttccaaatactgttgcatttggttatacacatagtttttatttgatacttttaacacatcatcattgttacgtaacatcggcaacatatagttatacgtacgctttgataagtgttgacgttcaatattaacgtttgaaagttgttctaatacattaccttgtgtatacgtcataatagtatcaatcacaaaatatatttttaccacaacatcattcacatattcgatttgattcacaaaagcgtaatagcgtctatcctcaaaatctgataaaaacgtcatgtagttaatcccttgtgcgtcatgccactgcatatcaacattgatttccattctatcacgtataaaattatacggttgtttggaatagtctaatgatttaaaatgacgaccgtttaaaaaataatcatcacgctctttattactattaaaatgaattgtattttgatagtctgtaaacggtgtgttatagaaaaatttaaaatttgttaattttctcatttttacctccataaaaaatagtcgtataaataatttatacgactattataacatttttattcaatgatttgtgtatctattgcaaaacgtttatctccatttgttaagtcactatcgctataatttgatgtaacaaaatgtaattcattattaaagtttaaatataatcttgtattcatcattttattatcaatcgcacattgtgtgtagtgatgtgttgattttaagtttgcgttaatcgtacctaatttaatatcaccgtttttcttaatcccttttaataccccttttaattgtatggttttaacaccattaattgttacaatacgatattgcggtgcgggataacccccgttgctatcacttgcaacaataccactttcaagttgcacatcttgccaacctgtatcattaaattgtaattttgcactgttaattttttgatcaaaattttgttcaatttctgatttagattgtgcaattttagtatctatatttaagttatccacttttgttgataaaacgcttatacttgattcgtttgttgatgttttttgttttaaatcactaatatcattatcatattttgataaatcaatatgaccgtttccgtcaacaactggtctgtcttttaattcttgaataactttttcaatttttgatattttatcattatttgtttttaaagtagcgatgtcagatttaattgaattaatatcctgtgtataatctttttggttaatactgtttaattttgtttctaactcttttatcttatcaaggttggtatttgctttgatgtcattaatggtttgttctaaactttcaagtttcccagaacttgaattttgttttaacttattaatatcctcttgtatttcttgaattgtgttgtcattgttttgtttagattttaataattcaatttgactttctatgtcttttattttatcaagattaacactttttttaacttcagctaattctctttttaatgcgtcaatgttttctgcaccagtatttgatttaattatattaatttcatttgtgtttcgtcctacactatctttagtagcgtttaaagattgtgtaagtgtttcatatttatcatcatactttaacattgatttttcaaattcatttaattgtgtttgatgttgttctaaactttcatttaatatgacatttttttcttttaatgaatcaatgtcttttttattactatcaatcattggttggaatttttttattttctctagaaatgttgatattttttctttgttatcattaattgcaatatcatgatgttctatttgaccactgtatttattaatcaatgtttttaaatcattataaaatgttaatttataataaccagtatcagtacggacataaatatgtccgtctgatgtactgattaagtcattttcttctgttaaaaaatctgctaacctgtctattgtttcaacttgtcttaaacttcttacgattctatcagccattgttcacacctcttatttgtatcgtttccaactaaactcaaagaaaaaacctaaaatacccattatgagaaaaccccccaaggaataccaacactataactattacccgttttaccgttccattttcttactggtaaataataacgtgtaccttgccagttgtaaccaatccatacatacccatctgataaacaaacttcgtcatatggtgtataaccatttggttggaaccaatatccattaggttcacttaatttaggactacctacacgtgcaaatattggtaaaaatccacatgtaaatgttgcattttcatttctgtaatatgtgccatattggttttgtttccattttccgaatgtgtttacttttgatgtttctaattcgttgctgttactagcagaaaatttaggtctaataaagtgtgttacaccgtcataataatgtgttcttattgttgctttttcccaaccgtcaaacccaccacctaaccagttttgctctaaacatgtataataatctaaattaccacttaacacacattgaatatgtccatattgtccatctgtatatacaccaacatcccctaattgtggtttaaagttcggtgtattttcatacaccattgctaaacctttaaagtcattattgattgcgtctttagcgttaccccacatacgaactttaccgtctgtaatgtaatatatataagcaacagctaagtcagcgcattgataaccaaatgctaaatcaaagtccacacctacaccctcatgcttatatatccattcttttgcttgttgttgtgatttcatgaaacattatcctttcttaacccaactatattgacgtttttttgtatctgcattaacgttactaaagaattctttatgttcggacacattagcctctaatgtttgtcttacttcaccgacagcgttaccacttgaaacacgtaaccatgcacccacttttttaatttcttctggtgcgtctctaaacaattccatttggttaccagtaatataatattcaccaggtgtcgtaacgtaagctatccagttattgtattgacttgcttctaaatactcttgatatggtgcgtctgttttgattgttgtccataaaccataatcccattttaatgtaaatacatcgagcgtcataccacgcatgattttaaccatttttcgaccagtagaaaaacgcgttaattcttgtactgtacctaatgtttgtgttgtagggtatacattgatgaaacaaccagcgtctataatttttttactaccattcattggcatatttttaagtttactagctgtaccaccgtcaatataatagaaccctgcttgtgttaagtcatttaagtcgtcaatatggtctggaattgataacgcacgtccatcgtcttttgttaatttatagttttgtgaacctctcgcacgtaatgcttcaaagtgttcatactcaccaagttgaaagaacccatataaattattgaatcgttttccaccaccgccattagtcatagcaagtaataacgatttacgttttgtttttggattggtataaatacaaataccctccggctctttaaagttatcacgtggaaaattaataccgtcttgatatgataatttaaacggataatcataaatcttttgaccagttgttaatgaatatttaccaatttgaacgtgtgaattaactgaactgttaccacttaaccagtataaatcatcaccatcaacggcaatcccttgcatccatcgattatcattgttttctgaattatcaatcgtcatttctttttctacattatcaatgtgattttttacgtcagctcttgaacgtacctgtattgtcccgtcaccgaatcttaaaacgattttgtcattttcttcatcaattaacggtgtaaacgtgtgtttgtttaaaagtgactgtggtgtataatctgttaaccctttagcctcttctaaatctaaaatataattatctttatatgcgacttgtaacagttttgctacaccgtcatgatgtaaccatattttcatttcaccgttagattgtctttctaaacctattgtagtaccgtgaccaccttgtacaatacgcatactagaaattaagtcaccgctaggcgttaatttattaatccaaaaaccttctgggttttgtgaatctgattgtgtagagtacatttgattcgtttctttatctatgtttatagattggttaacagcattacgaataccaccgaatcccataacaaactttggttcaagctcatttaattcaaaaccattaacaaaacggtcaatgtctttaattaagtctttaacttctgatttaaaatcattcatttgtttcatttctgcaactttaaataatgcaaatgcagatgtaagaccagtactatatttagtaaattcatcatgaataattttatctattgtaccgtcgtttaaccaacctctaaataagtctttcgcttggtctgggaatgctttcattaagtcgtcccaatttttgaaacgtttttttaattcattgtcatagtcccaaatacgacgtgctaatacttcaattagttttgataatcttgaaatataatcataatatgattttgaattggtattataatctgctctatcatcgtaaaacggtgtgtaacgttctctcgttttatatatttcgtctaaaaatggacgaatgtcgtcaaaatatttaaaatcgttttcattatatgccataattttccacctttaccaaatttgtaaaaaacattttttatcaaattcatttaaaattttctttcttaaatcgtatactttatcaatattatcaattaaatactgttttgaaaattgtgtacctttcgcattacctttttgattttgattacgttttgcgttttgattactttcgttacttgatttattcacagttttaccgttgtcaattgtattattatctgcaaatcgtaacgttgtgttatctacatcaatgttaacctcgctttgtggtaatgacgcataagcatttctgttcgctgtcatgccagttgaattgtctaaagatgttgcattttgatttgaggtttcatctgtattgtttgttgtatcttcattatgttctgtaaaaccttgtgattgtagatatttttcaacttcgcttgatgaataaaccacattcaaataatcctcatgtgtgatacatacagtaatcacttgcatgccaaaagcttcaactgtttgtctgttgatttctctatctaaaaagtgtattgtaaatgattttttaaaaagtaagtcagataagtcatctttaagtttaaaacctttaaacactttttcattaacgatggctaaaacgtctttgtcaaacttcaacattttttgcatgaattgaaattcatcatcataaaacgttaatttatcattatttacaaattcattaaaaccttttttaattaattctgatttaataaaatcaaataaagtcattgtatatctagccattgtattcactactttcatcattagacaatgtatctatcattgtgatttctgaagtaacttcatcgtcgtaatacggtttaatatctaaaccataacgttttgataagaatgtaatcggttcacgaccttttaaataaatattactatttgatgtggtaaaacctcggttgctttttgcctcttcgtccgaaacaccgctttccttatccactgctagtgagttaatacctaaatagttacttaattcactaattttattttggtattcgcgtttcatctcagttagtgctggaatcacactattactggttaaatctatgatatcatcatcggcgttaaacataggtgacattttaacaaatggtgcaccgttgtatatttccgatacaagttgattaactgactcatcattaatgtctgatttaaatattttgctaaattttgcttgcataattaatgagaatctagataaaacaacctcagataattcatcagtataatgttctataatttctatatcactattatattgaattggtttattttgcatgacaacaaagttaccactcatacagttatcatatattttatgaatctgtaagcattcatctggtattaaatagtctggaacaatgaaataaatatcatcttttgttaatcgtttttgaaattgaaagttaaagtttgatgaaaaatttggtgcttgattaaagtaagtattatttacgtaaccaagaatcataatttgttcatttcttgctttgccgaccactacattgatgttttgtcttaatgctgattctaattgaataaaatctataccaaccgtatcacgattggtatagttgatgagtagtggtaaaaattccaaataacgattaaacataagacgtttaaatctgttgcgatgttctacaactcttttgttgatttcttttgataattcaacctgtacacctttattatgtttagtcatttatagcacctctattattctgttcttggtgttacatcttggtcagtaattaaaattttattaaagaatgggctaatggctttaaatgaatagtaatgaatccagtgtgtgacttcatcaaattcaccattatagaatggttgttttaacataccttttgtgtaacgtttatatttaattgaattaatatccaaaataaacgcgtataaatctgattttggtttaatttcttcaacattatctttaaactctgatagttttgacacatcataagtgaatactgaaccaactggaattgtatcacctttatgagtttgataatcaccgtaagcacgtaagaaagctactgattcatcacttgatacgacaatatctttagtgactttgaaaacaccacctaggtcgtcaaaactgataacgtggtctgtaaagtcaatccctgctacttggaatgtgttcgcaatctttgtatctaaaagataagattttaagctatcagtcgttaaaataacaatatcttttaattttgaaactgttgtatattgtccgattgcaccacctgaagcacgatgaacttcattatatttagcgctgttgttttgtaagttaagaatagcttcaaaaactttacttgctaaatcttcttttgatgttgctttacgtacatttgattcagataattgattcaatgagtaatcaactaacattgcacgcatttctttttcttctaatacgttaatatcagaaattttctttttatagacacctaatgcataattagtagcgtctgctaatgtttggaaattgaaacgtgtgtcattgttatttaatgtaaatttttgtttcttcacaataccactaccatataacttagtagccatacgtggatagttacgtttcaacattagttcttcatttttagataagtccatgttaataggtactgtatccataattacatattcttcactgtattgacctataaagtcctgctctttagctaaccaattaaaacggttacctaatgcaatatcgattaataacgtttcattaatcttagggaataaaaatttatttacaaatgtttcaaacattgtattagaattatcccacttatcgccaaacgtccatgattttgaataagtatgattaaagtcttgtaatgcagatttagctgactttgcaactaatagtgctgtttcgttttttgtactcttttctgccatgatttattattcctcctcaacatcgccagtaaatgactgttttgaaagtgaatgaatttgtacaccataactatcttcacttttatttgtatcaattgacatattttcatttaattctgttcgtttatttaatcttgaatcttcatatgatgtacccatcatagaacgcatgttgttaccctcgtacatgtttaagttcctcctaatctaaatctaatttatcgacaagttcttcatctgaatagtctttatcattgttatctgtttcttttgattctggttgtggttgtggttgtggttgtggttgttgcatttgtgatgtttcaaaattagtaaatcgttgttctaatgaagcgatacgttgttctaaaacaactgggtctaattttgcacaatcttcatctgttgtagtaggttctaatttgttttcattttcttcttcgattgtttctactgttttatcttcagttgattcttcagttgattcttcagttgattctgaagtttcttcagttgattctgaagtttcttctttgtcgtctggttttacgatttcatcaaattctgtcattttgacacctccaaatattttataactaattatatcatagaatatttaaataagtaaattaaatttattttattttcaaatcataactttgaataaaagtcaatagatacataaattttgtatttaatgaatatgtaataggttagataagttggaaaagtagacgcacagtttttataagtttagtaaagaaatgatatgttaatttataagttttgatttgtataatcgtttattttaaacggtggggaggtgtaaatttacaataactttttccc

SEQ ID NO: 127 - DNA, 18166 bp, Rosenblumvirus sp.
  source 1..18166: mol_type = genomic DNA
gggaaaaagtttttgtaaaattacacctccccaccgtttaaaataaacgattatacaaatcaaaacttataaattaacttatcatttctttactaaacttataaaaactgtgcttctacttttccaacttatcaaacctataacatattcataaaatacaaaatatatgtatctattgacttttattcaaaattatgatttgtatttaaaatctaatttcttctattaaatagtatttttaaattatttaaactttttaagaaaaaccattgacaaaacttttaaacgtttgctatactatgtatgtaatcaaatcaaggaggtaacaaaatggaaaatgtacaacctttacaaacttacattttaaaaaatggtaatatagttattgttatgggtaatacatcaacttatgaattaacattatttgtacttgaaaaggacgattttgaacaattagaccataattcacctaaaaaaatcgttgatgaattaaggaatgaaatcaatgatttaaggagtgataataatggttaatgttgataatgcacctgcagaaaaaggtcaagcatatactgaaatgttgcaactattcaataaacttattcaatggaatccagcttatactttcgacaatgcaattaacttagtatcggcttgccaacaactattattaaactataatagttctgttgttcaattcttaaatgatgaactaaacaacgaaactaaaccagaatctattttatcttacattgctggtgatgacccaatagaacaatggaatatgcacaaaggattttatgaaacgtataacgtttacgttttttagaaaggagtgatataataatgaaacctgatgatattgttacattacgaattaaaggttatattcttcactatttagatgataaaaatgaatatgttgaagaatttattccacttcatgagtatcatttatcaaaaacacaagcaaaagatttattacctaattcacacaaacttttatccactacacgcacaacgaaaacaattcaagtttattacaatgatttactacaaatttcaattccagaaagcaaataatttaaataagaggagaaataaaaatgacaaacgtaaaagatattttatcaagacaccaaaacacattagcgagatttgaatttgaggaaaaagaaagagaatttattaaactatcagaattagtagaaaaatacggtatgaaaaaagagtatatcgttagagcattattcacaaacaaagaatcaaaattcggtgaacaaggtgttatcgtcactgacgactataacgtaaacttaccgaatcacttaactgaattaattaaagacatgcgtcaagacgaggacgttgttaacattatcaatgctggtgaagtgcaatttacaatttatgaatatgaaaacaaaaaaggtcaaaaaggttactcaatcaactttggtccagtatcattttaatacaattttataggggatatttatcccctatttttatgaggtgctaaacaatggaaaaaatatacactgccgtattattatacaatgtatcaattaatgaaacatatgaacatgaaattgaacaattcgaaaaaataaataaagttaaggtaatatatagttattttgacgcaaacttttacaaaaaaggtgcatataatctttgtgtaaaatacattaaggagatataaaatgaatattacaacaatattaaacacaaaaaaattaattaattatattttagataatagagattgttttatgaataaaataacaaaatttgaatcactaagtggaaaatgtgttgtttttgttagatacggtgaaatttctattgaatactatgatagtgatacaaaatacaatgatttatttactttagacattgacgttgatgttcgtacatatagttttagttgtcttgaggttttttatcgagaacatttaaacccattatataaaaaagaagtttttatggattgtactattgatgacgtattagaatatttcgagaaaccaatagaaagtaatataacaataatttttcaaaacaaagtgatatataataacgggaacgtgatagaacatgactaatatattaaacatagctattattttccttttagcatttttaattacacttgtaatacttatgacaatgcatatacgtgtgtcatttggtgttttatttactacattgattatattctacattatctttttagtggttatatatgggttatatggaggtcgttagcaatggttagacatacgtccgaaatggataaatggaaaaaagaaagagacgcaagaaaagagcaggaaaaagaattgtttttaaatgattttagtactgttaattttaaatttgatgataaagatttacaagaggcgtacatagacacatggaaacatttcgcacatttgccctattttccaaaagaaagaaacgtgtcatatgcaaatgccgtatcattggtaagaggtaaaagacatgaacaattaaactatatacttgaaatatataaccgtaaagatgaatctaataataaaaacgctaaaaaacataaatatgctttatatgaattacaagctaaaaataataattcttctatgtataaatatattaaagaaattgacactttatacaaagaaattggtaaatcagacagaccagtgactactattgatgataaagatgtgaggtataactttttatattatgcaacatttgaagagtaattttaatactgtaaacgacatcataaactattataaggagcaaaaacatggtgaaacaaaatcgtttagacatggtaagagattatcaaaatgctgtcaatcatgtcagaaaaaaaataccagataactataatcaaatagaattagttgatgaactcatgaatgatgatatagactattacatatctatttcaaaccgttctgacggaaaatcgttcaactatgtttcattctttatttatttagctataaaacttgatattaaatttactttattatcacgtcattatacattacgtgacgcttatcgtgattttattgaggaaatcatagacaaaaacccactattcaaatctaagcgtgtcacattcagaagcgctagggactatttagctatcatctatcaagataaggaaatcggtgtgattacagatttgaatagtgcaactgatttaaaatatcattctaactttttaaaacactaccctatcattatatatgatgaatttttagcacttgaagatgactatttaattgacgagtgggataagttaaaaacaatttatgaatcaatcgaccgtaaccatggtaatgttgattatattggctttcctaaaatgtttttactaggtaatgcagtcaacttttcaagtcctatattatccaatttaaatatatataacttattacaaaaacataaaatgaacacatcacgactttacaaaaacatttttttagaaatgcgaagaaacgattacgtaaatgaaaagcgtaacacacgggcattcaattcaaacgatgacgctatgactactggcgagtttgaatttaacgaatataatttggcagatgataatttaagaaatcatatcaatcaaaacggtgattttttctatattaaaactgacgataaatatataaaaattatgtataatgttgatacatttaatgctaatattattgttataccttatacaaaacaatatgaattttgtactaaaatcaaagatatagatgacaatgttatttatttaagagaagatatgttttataaagaaaacatggagcgttattattacaatccaagcaatttacattttgataacgcttactcaaaaaattacgttgttgataatgatagatatttatatttagatatgaataaaattataaaatttcatataaaaaatgaaatgaagaaaaatatgagtgaatttgaaagaaaagaaaaaatatatgaagataactatattgaaaatacaaagaagtatttaatgaaacaatacggcttataaaaggtgtgtaagattatgggattactagaatgcatgcaatatcataaacatgaacgtcgaatgattttatactgggatatagaaacattagcgtacaataaagttaacggacgaaaaaaaccaaccaaatataaaaacgtaacgtattcagtagcaattggttggtttaatggttatgagattgatgtagaagtatttcctagttttgaatcgttttatgacgcattttatacgtatgtgaaacgacgtgatacaatcactaagtcaaaaacagatattatcatgattgcacataactgtaataagtatgacaaccattttttacttaaagataccatgcgttattttgataatatcacacgtgaaaatatatatttaaaatctgcagaagaaaacgaacacacactaaagatgcaagaggctactattttagctaaaaatcaaaatgtgattttagaaaaacgtgtgaaatcgtctattaatttagacttaacaatgtttttaaatggatttaaatttaatattattgataactttatgaaaacaaatacatcaattgcaacattaggtaaaaagttgcttgacggtggttatttaacagacgaccaacttaaaacagattttaattacacgatatttgataaagataacgacatgtcagatagtgaagcctatgactatgccgtaaagtgttttgctaaactcacacctgaacaacttacatacattcataatgacgttattatattaggtatgtgccatattcattatagtgatatatttccaaattttgactataacaaattaacattttcattgaatattatggaatcgtatttaaataatcaaatgacgcgttttcagttactcaatcaatatcaagatattaaaatatcatatacacattatcatttccatgatatgaatttttatgattatatcaaatcattttatcgtggtggtttaaatatgtataacactaaatacataaacaaacttattgatgagccttgtttttctattgatatcaattccagttatccttatgtgatgtatcatgagaaaattccgacatggttatacttttatgaacattattcagaacctacattaatccctacttttttagatgatgacaattatttttcattatataagattgataaagatgtatttaacaatgatttattaattaaaatcaaatcacgtgtattacgtcaaatgattgtaaaatactataataatgataatgattacgttaatattaatacaaatacattaagaatgattcaagacattacgggtattgattgcacgcatatacgtgttaattcgtttgtgatatatgaatgtgaatactttcatgcacgtgatattatatttcaaaactattttattaaaacacaaggtaagttaaaaaacaaaatcaacatgacatcaccttacgactatcatattactgatgacatcaacgaacacccttactcaaatgaggaggttatgttgtctaaagttgtacttaacggattatatggcatacctgcattacgttcacattttaacttattccgtttagatgataacaacgaactatataatatcattaacggttacaaaaacactgaacgtaatatattattctctacatttgtcacatcacgttcattatataacttattggtacctttccaatacttaactgaaaatgaaattgacgacaattttatttattgcgatactgatagtttgtatatgaaatccgttgttaaacccttattgaaccccagtttattcgacccgatagccttaggtaaatgggatattgaaaacgaacagatagataagatgtttgtactgaatcataaaaaatatgcatatgaagtgaatggaaagattaaaattgcttctgctggtataccgaaaagcgcctttgatacaagcgtcgattttgaaacctttgtacgtgaacaattctttgacggtgtgataatagaaaacaataaaagtatctataacgaacagggtacgatatcgatttatccgtctaaaacagaaattgtatgcggtaatgtatatgatgaatattttactgatgaacttaatatgaaacgtgaatttatcttaaaagacgctagagaaaattttgaccatagtcaatttgatgatattctttatattgaaagtgacatcggttcattctcacttaatgacttatttccagttgtacgttcagtgcataataaatctaatttgcatatattaaaacgtgaacacgatgaattaaaaaaaggcaactgttaaataacagtcgcctttttcttttgatataacatgaaaaatgtgtacgaaaattgattatgttttgtattttatttactagcattactagcatgttttcattatagcatagttaattaagcaataccactgaagaatacaatattatcaccagcgttatgaggtacaccattaatcaatgtatataatacaacccgtgacggtgccacgtatggtgggacgttatagtttgctactaagaatgaaccatcgtcaaatactgctacaacgacacctgtgtgaccaatgccatatgctgttgcttgtaagtatggtggtttacttgaaaaaccataccctactgttggattatgtgttgtttttgcacctaactttttatatacgtaccacacacgttgaccgtttgttatttgaccgtcgtctgttggttgtcttttaccatgtaattgtgacatatatgcccatgttaattctgtacattgtcctgcattacccgtttgaggaaatatgttacctggtttgtacaagtattcttttttgaataaaggtacaccaattgcttttttatatttttctggtaactgtgcatacgtccagttaccaccaatgacgcgtccacttttaccatttggtttgactgacttaccactaattggtttatggtccccgtcatcatcagtagggtttgaactactatccccactatctacttgcacactatcaatcagtttttttaatgaatcaagtagcccaatcgtcattttaatatgatatgtgttgttaaatgttttttgtaatgtaaaataatcattactaaaaaatttatcactaccaatactgtgtacatcccattgtaatgcgtcttgtactttttttaataattcttgcatggcttgttttgctaaagcgagcagtgaactaccactgtcaccactactaccactgtcagacgaatcactaggtgaaccacctttaccgtctaatttaccaccccatgctaaaatagtatttgcaccgtctaaaaaaggattaccatagttttgtactttattatatgacgctttcaaacctaggggataatatgccgcccaagtagccgctgctgttaatggaatatacgcacgtccgattgtacctgctttcatatttttagcaaaatctgcattaccttttctttgtacgtcttgaggtacaaagtgaacgatgttacctgcgtcataccaagacggttgtcctgcttgttttgattgtgatactaattttcttgcaatgaatttagcgtctgttaaatagtcacctcgtgcagatgtatggttcaaccaacctaaaccagcgctatacccttcatttttttcatatacagcaaaaagagtaggtgacacacctatctcttttactgcttttaatacttgtctgattttactttcattaccacctagccatacattaaagcgtccatacccttttactttagggactaactggtctatcgttaaaccgaaatcatcattaatatacgaatgcgtaaatttatctatcttctcttggtcgttcattattatcacccttttcagaatcgtttttaattactcttaatttatctttaatttgttcaggcactaatacgtccatttcagcacaattttcaacaatagatagtccctcatttgcgatataatagaaaatcgtaatcatgagtaaaccaccttttaattgtaaaatctggtcaatgatgttagctaaaatgataatacagaatatcaataattttttagcaaaacctttcattgattttttagaccatagattattatttttaattgctttagcaaaaccagtaacaacatctataatcatcaaaacaaataaaaaatatagtaactttaaatcacctgcatatatgaacatatgaaatgcttctgtgtccgtaaatcttaattttacctcattcattttatacaccttctctaaatttattatttaacgggttctgtaacattggattacctgaaccgtcattatgccaaaatctcacaccagattctaaaattgcttttaattgttccattaacatagggtcaatgtcacgtatggtatacgtacctgtacattttaaatagttgcatacagtcatgctgttaataggttcaatgaatgtattatagtcatttacttcaaaaccaaacaacatataatatttttgtaaaaatgtaatttctttaggtgacggtacactaattttcatcgttaaaccgttaatgctatttgcaatttggaatgcgtttcccatttctgattctgtcacagatggtggttgtaaggctaaatctttatattctgcctgttgttgtttgtagaaattatattcttcattaaacttaccaaataaagcggttggacttaaattacttgctacacttacagcgtcataaaaacgtgattttgggtcactaccatttaatacattatctatacgacttgtgattaattgactttctgcattacgctgtctattggcttgttgtgattgtcctaaaattccgttattaattaatataggcacttgcgcaaaactattaaatgttatattggtatttaagaatgaacctgtatcaattaatatatctttatttttagcaagtatcggtctatcgttttcagcactgttataatcaactggatatactcgcacttcattatgataaccaatgatggattttgtacgtaacttaacacctgttttttgtgaaattttaccagcgtcaagtaacattgtgttaccgttccagtcataaaattcaatcgtcatgtactcattacgtatcatatgtttaaactcgtcttttttagacaacatcatctcttgaagctttgtgaaacttaatgataaatcgtttaaactccattcttttgattttccaccctgttttaatgtctttaatccagtaattttttcacttgtcttaacgtcctctaaatcttttgtattaataaaatctttaggtaacatttgaaccttttgaaagttttgtgtaatccatggatatgcactcattttatccataaagttaataaagtcaccatattccataacgtataagttgactggcgatgtgatattgtcatatatcgtacctttagacgtatctaagtttggctcttttttcgtaccaaatttctttgataaatcagcgcttgactggaataacactaaattttccaaatactgttgcatttggttatacacatagtttttatttgatacttttaacacatcatcattgttacgtaacatcggcaacatatagttatacgtacgctttgataagtgttgacgttcaatattaacgtttgaaagttgttctaatacattaccttgtgtatacgtcataatagtatcaatcacaaaatatatttttaccacaacatcattcacatattcgatttgattcacaaaagcgtaatagcgtctatcctcaaaatctgataaaaacgtcatgtagttaatcccttgtgcgtcatgccactgcatatcaacattgatttccattctatcacgtataaaattatacggttgtttggaatagtctaatgatttaaaatgacgaccgtttaaaaaataatcatcacgctctttattactattaaaatgaattgtattttgatagtctgtaaacggtgtgttatagaaaaatttaaaatttgttaattttctcatttttacctccataaaaaatagtcgtataaataatttatacgactattataacatttttattcaatgatttgtgtatctattgcaaaacgtttatctccatttgttaagtcactatcgctataatttgatgtaacaaaatgtaattcattattaaagtttaaatataatcttgtattcatcattttattatcaatcgcacattgtgtgtagtgatgtgttgattttaagtttgcgttaatcgtacctaatttaatatcaccgtttttcttaatcccttttaataccccttttaattgtatggttttaacaccattaattgttacaatacgatattgcggtgcgggataacccccgttgctatcacttgcaacaataccactttcaagttgcacatcttgccaacctgtatcattaaattgtaattttgcactgttaattttttgatcaaaattttgttcaatttctgatttagattgtgcaattttagtatctatatttaagttatccacttttgttgataaaacgcttatacttgattcgtttgttgatgttttttgttttaaatcactaatatcattatcatattttgataaatcaatatgaccgtttccgtcaacaactggtctgtcttttaattcttgaataactttttcaatttttgatattttatcattatttgtttttaaagtagcgatgtcagatttaattgaattaatatcctgtgtataatctttttggttaatactgtttaattttgtttctaactcttttatcttatcaaggttggtatttgctttgatgtcattaatggtttgttctaaactttcaagtttcccagaacttgaattttgttttaacttattaatatcctcttgtatttcttgaattgtgttgtcattgttttgtttagattttaataattcaatttgactttctatgtcttttattttatcaagattaacactttttttaacttcagctaattctctttttaatgcgtcaatgttttctgcaccagtatttgatttaattatattaatttcatttgtgtttcgtcctacactatctttagtagcgtttaaagattgtgtaagtgtttcatatttatcatcatactttaacattgatttttcaaattcatttaattgtgtttgatgttgttctaaactttcatttaatatgacatttttttcttttaatgaatcaatgtcttttttattactatcaatcattggttggaatttttttattttctctagaaatgttgatattttttctttgttatcattaattgcaatatcatgatgttctatttgaccactgtatttattaatcaatgtttttaaatcattataaaatgttaatttataataaccagtatcagtacggacataaatatgtccgtctgatgtactgattaagtcattttcttctgttaaaaaatctgctaacctgtctattgtttcaacttgtcttaaacttcttacgattctatcagccattgttcacacctcttatttgtatcgtttccaactaaactcaaagaaaaaacctaaaatacccattatgagaaaaccccccaaggaataccaacactataactattacccgttttaccgttccattttcttactggtaaataataacgtgtaccttgccagttgtaaccaatccatacatacccatctgataaacaaacttcgtcatatggtgtataaccatttggttggaaccaatatccattaggttcacttaatttaggactacctacacgtgcaaatattggtaaaaatccacatgtaaatgttgcattttcatttctgtaatatgtgccatattggttttgtttccattttccgaatgtgtttacttttgatgtttctaattcgttgctgttactagcagaaaatttaggtctaataaagtgtgttacaccgtcataataatgtgttcttattgttgctttttcccaaccgtcaaacccaccacctaaccagttttgctctaaacatgtataataatctaaattaccacttaacacacattgaatatgtccatattgtccatctgtatatacaccaacatcccctaattgtggtttaaagttcggtgtattttcatacaccattgctaaacctttaaagtcattattgattgcgtctttagcgttaccccacatacgaactttaccgtctgtaatgtaatatatataagcaacagctaagtcagcgcattgataaccaaatgctaaatcaaagtccacacctacaccctcatgcttatatatccattcttttgcttgttgttgtgatttcatgaaacattatcctttcttaacccaactatattgacgtttttttgtatctgcattaacgttactaaagaattctttatgttcggacacattagcctctaatgtttgtcttacttcaccgacagcgttaccacttgaaacacgtaaccatgcacccacttttttaatttcttctggtgcgtctctaaacaattccatttggttaccagtaatataatattcaccaggtgtcgtaacgtaagctatccagttattgtattgacttgcttctaaatactcttgatatggtgcgtctgttttgattgttgtccataaaccataatcccattttaatgtaaatacatcgagcgtcataccacgcatgattttaaccatttttcgaccagtagaaaaacgcgttaattcttgtactgtacctaatgtttgtgttgtagggtatacattgatgaaacaaccagcgtctataatttttttactaccattcattggcatatttttaagtttactagctgtaccaccgtcaatataatagaaccctgcttgtgttaagtcatttaagtcgtcaatatggtctggaattgataacgcacgtccatcgtcttttgttaatttatagttttgtgaacctctcgcacgtaatgcttcaaagtgttcatactcaccaagttgaaagaacccatataaattattgaatcgttttccaccaccgccattagtcatagcaagtaataacgatttacgttttgtttttggattggtataaatacaaataccctccggctctttaaagttatcacgtggaaaattaataccgtcttgatatgataatttaaacggataatcataaatcttttgaccagttgttaatgaatatttaccaatttgaacgtgtgaattaactgaactgttaccacttaaccagtataaatcatcaccatcaacggcaatcccttgcatccatcgattatcattgttttctgaattatcaatcgtcatttctttttctacattatcaatgtgattttttacgtcagctcttgaacgtacctgtattgtcccgtcaccgaatcttaaaacgattttgtcattttcttcatcaattaacggtgtaaacgtgtgtttgtttaaaagtgactgtggtgtataatctgttaaccctttagcctcttctaaatctaaaatataattatctttatatgcgacttgtaacagttttgctacaccgtcatgatgtaaccatattttcatttcaccgttagattgtctttctaaacctattgtagtaccgtgaccaccttgtacaatacgcatactagaaattaagtcaccgctaggcgttaatttattaatccaaaaaccttctgggttttgtgaatctgattgtgtagagtacatttgattcgtttctttatctatgtttatagattggttaacagcattacgaataccaccgaatcccataacaaactttggttcaagctcatttaattcaaaaccattaacaaaacggtcaatgtctttaattaagtctttaacttctgatttaaaatcattcatttgtttcatttctgcaactttaaataatgcaaatgcagatgtaagaccagtactatatttagtaaattcatcatgaataattttatctattgtaccgtcgtttaaccaacctctaaataagtctttcgcttggtctgggaatgctttcattaagtcgtcccaatttttgaaacgtttttttaattcattgtcatagtcccaaatacgacgtgctaatacttcaattagttttgataatcttgaaatataatcataatatgattttgaattggtattataatctgctctatcatcgtaaaacggtgtgtaacgttctctcgttttatatatttcgtctaaaaatggacgaatgtcgtcaaaatatttaaaatcgttttcattatatgccataattttccacctttaccaaatttgtaaaaaacattttttatcaaattcatttaaaattttctttcttaaatcgtatactttatcaatattatcaattaaatactgttttgaaaattgtgtacctttcgcattacctttttgattttgattacgttttgcgttttgattactttcgttacttgatttattcacagttttaccgttgtcaattgtattattatctgcaaatcgtaacgttgtgttatctacatcaatgttaacctcgctttgtggtaatgacgcataagcatttctgttcgctgtcatgccagttgaattgtctaaagatgttgcattttgatttgaggtttcatctgtattgtttgttgtatcttcattatgttctgtaaaaccttgtgattgtagatatttttcaacttcgcttgatgaataaaccacattcaaataatcctcatgtgtgatacatacagtaatcacttgcatgccaaaagcttcaactgtttgtctgttgatttctctatctaaaaagtgtattgtaaatgattttttaaaaagtaagtcagataagtcatctttaagtttaaaacctttaaacactttttcattaacgatggctaaaacgtctttgtcaaacttcaacattttttgcatgaattgaaattcatcatcataaaacgttaatttatcattatttacaaattcattaaaaccttttttaattaattctgatttaataaaatcaaataaagtcattgtatatctagccattgtattcactactttcatcattagacaatgtatctatcattgtgatttctgaagtaacttcatcgtcgtaatacggtttaatatctaaaccataacgttttgataagaatgtaatcggttcacgaccttttaaataaatattactatttgatgtggtaaaacctcggttgctttttgcctcttcgtccgaaacaccgctttccttatccactgctagtgagttaatacctaaatagttacttaattcactaattttattttggtattcgcgtttcatctcagttagtgctggaatcacactattactggttaaatctatgatatcatcatcggcgttaaacataggtgacattttaacaaatggtgcaccgttgtatatttccgatacaagttgattaactgactcatcattaatgtctgatttaaatattttgctaaattttgcttgcataattaatgagaatctagataaaacaacctcagataattcatcagtataatgttctataatttctatatcactattatattgaattggtttattttgcatgacaacaaagttaccactcatacagttatcatatattttatgaatctgtaagcattcatctggtattaaatagtctggaacaatgaaataaatatcatcttttgttaatcgtttttgaaattgaaagttaaagtttgatgaaaaatttggtgcttgattaaagtaagtattatttacgtaaccaagaatcataatttgttcatttcttgctttgccgaccactacattgatgttttgtcttaatgctgattctaattgaataaaatctataccaaccgtatcacgattggtatagttgatgagtagtggtaaaaattccaaataacgattaaacataagacgtttaaatctgttgcgatgttctacaactcttttgttgatttcttttgataattcaacctgtacacctttattatgtttagtcatttatagcacctctattattctgttcttggtgttacatcttggtcagtaattaaaattttattaaagaatgggctaatggctttaaatgaatagtaatgaatccagtgtgtgacttcatcaaattcaccattatagaatggttgttttaacataccttttgtgtaacgtttatatttaattgaattaatatccaaaataaacgcgtataaatctgattttggtttaatttcttcaacattatctttaaactctgatagttttgacacatcataagtgaatactgaaccaactggaattgtatcacctttatgagtttgataatcaccgtaagcacgtaagaaagctactgattcatcacttgatacgacaatatctttagtgactttgaaaacaccacctaggtcgtcaaaactgataacgtggtctgtaaagtcaatccctgctacttggaatgtgttcgcaatctttgtatctaaaagataagattttaagctatcagtcgttaaaataacaatatcttttaattttgaaactgttgtatattgtccgattgcaccacctgaagcacgatgaacttcattatatttagcgctgttgttttgtaagttaagaatagcttcaaaaactttacttgctaaatcttcttttgatgttgctttacgtacatttgattcagataattgattcaatgagtaatcaactaacattgcacgcatttctttttcttctaatacgttaatatcagaaattttctttttatagacacctaatgcataattagtagcgtctgctaatgtttggaaattgaaacgtgtgtcattgttatttaatgtaaatttttgtttcttcacaataccactaccatataacttagtagccatacgtggatagttacgtttcaacattagttcttcatttttagataagtccatgttaataggtactgtatccataattacatattcttcactgtattgacctataaagtcctgctctttagctaaccaattaaaacggttacctaatgcaatatcgattaataacgtttcattaatcttagggaataaaaatttatttacaaatgtttcaaacattgtattagaattatcccacttatcgccaaacgtccatgattttgaataagtatgattaaagtcttgtaatgcagatttagctgactttgcaactaatagtgctgtttcgttttttgtactcttttctgccatgatttattattcctcctcaacatcgccagtaaatgactgttttgaaagtgaatgaatttgtacaccataactatcttcacttttatttgtatcaattgacatattttcatttaattctgttcgtttatttaatcttgaatcttcatatgatgtacccatcatagaacgcatgttgttaccctcgtacatgtttaagttcctcctaatctaaatctaatttatcgacaagttcttcatctgaatagtctttatcattgttatctgtttcttttgattctggttgtggttgtggttgtggttgtggttgttgcatttgtgatgtttcaaaattagtaaatcgttgttctaatgaagcgatacgttgttctaaaacaactgggtctaattttgcacaatcttcatctgttgtagtaggttctaatttgttttcattttcttcttcgattgtttctactgttttatcttcagttgattcttcagttgattcttcagttgattctgaagtttcttcagttgattctgaagtttcttcagttgattctgaagtttcttctttgtcgtctggttttacgatttcatcaaattctgtcattttgacacctccaaatattttataactaattatatcatagaatatttaaataagtaaattaaatttattttattttcaaatcataactttgaataaaagtcaatagatacataaattttgtatttaatgaatatgtaataggttagataagttggaaaagtagacgcacagtttttataagtttagtaaagaaatgatatgttaatttataagttttgatttgtataatcgtttattttaaacggtggggaggtgtaaatttacaataactttttc

SEQ ID NO: 128 - DNA, 18119 bp, Rosenblumvirus sp.
  source 1..18119: mol_type = genomic DNA
ggaaaaagtttctgtaaaattacacctccccaccgtttaaaataaacgattatacaaatcaaaacttataaattcacttatcatttctttactaaacttataaaaactgtacgtctacttttccaacttatctaacctataacatattcatcaaatacaaaatttatgtatctattgacttttatcaaaatttatgatttgtatttaaaatctaatttcttctattaaatagtatttttaaattatttaaacttttttaagaaaaaccattgacaaaacttttaaacgtttgctatactatgtatgtaatcaaatcaaggaggtaacaaatggaaaatgtacaacctttacaaacttacattttaaaaaatggtaatatagttattgttatgggtaatacatcaacttatgaattaacattatttgtacttgaaaaggatgattttgaacaattagaccataattcacttaaaaaaatcgttgatgaaataaggaatgaaatcaatgatttaaggagtgataataatggttaatgttgataacgcacctgaagaaaaagggcaagcctatactgaaatgttgcaactattcaataagttgattcaatggaatccagcttatactttcgacaatgctattaatttagtatcagcttgccaacaactattattaaactataatagttctgttgttaaattcttaaatgatgaactaaacaacgaaactaaaccagaatctattttatcttacattgctggtgatgacccaatagaacaatggaatatgcacaaaggattttatgaaacgtataacgtttacgttttttagaaaggagtgatataataatgaaacctgatgatattgttacattacgaataaaaggttatattcttcattatttagatgataaaaatgaatatgttgaagaatttatcccacttcacgagtatcatttatcaaaatcacaagctaaagacttattacctaatacacacaaacttttatccactacacgacatactaaaactatgcaagtttattacaatgatttactacaaattgcaattgcagaaagcaaataatttaaataagaggagaaataaaaatgacaaacgtaaaagatattttatcaagacaccaaaacacattagcgagattcgaatttgaggaaaaagaaagagaatttatcaaactatcagaattagtagaaaaatacggtatgaaaaaagagtatatcgttagagcattattcacaaacaaagaatcaaaattcggtgtacaaggtgttatcgtcactgacgactataacgtaaacttaccgaatcacttaactgaattaattaaagacatgcgtcaagacgaggacgttgttaacattatcaatgctggtgaagttcaattcacaatttatgagtatgaaaataaaaaaggtcaaaaaggttattcaatcaactttggtcaagtatcattttaatacaatttcataggggatatttatcccctatttttatgaggtgctaaacaatggaaaaaatatacactgccgtattattatacaatgtatcaattaatgaaacatatgaacatgaaattgaacaattcgaaaaaataaataaagctaaggtaatatatagttattttgatgcaaacttttataaaaaaggtgcttataatctttgtgtaaaatacattaaggagatataaaaatgaatattacaacaatattaaacacaaaaaaattaattaattatattttagataatagagattgttttatgaataaaataacaaaatttgaatcactaagtggaaaatgtgttgtttttgttagatacggtgaaatttctattgaatactatgatagtgatacaaaatacaatgatttatttactttagacattgacgttgatgttcgtacatatagttttagttgtcttgaggttttttatcgagaacatttaaacccattatataaaaaagaagtttttatggattgtactattgatgacgtattagaatatttcgagaaaccaatagaaagtaatataacaataatttttcaaaacaaagtgatatataataacgggaacgtgatagaacatgactaatatattaaacatagctattgttttccttttagcatttttaattacacttgtaatacttatgacaatgcatatacgtgtgtcatttggtgttttatttactacattgattatattctacattatctttttagtggttatatatgggttatatggaggtcgttagcaatggttagacatacgtccgaaatggataaatggaaaaaagaaagagacgcaagaaaagagcaggaaaaagaattgtttttaaatgattttagtactgttaattttaaatttgatgataaagatttacaagaggcgtacatagacgcatggaaacatttcgcacatttgccctattttccaaaagaaagaaacgtgtcatatgtaaatgctgtatcattggtaagaggtaaaagacatgaacaattaaactatatacttgaaatatataaccgtaaagatgaatctaataataaaaacgctaaaaaacataaatatgctttatatgaattacaagctaaaaataataattcttctatgtataaatatattaaagaaattgacactttatacaaagaaattggtaaatcagacagaccagtgactactattgatgatgaagatgtgaggtataactttttatattatgcaacatttgaagactaattttaatactgtaaacgacatcataaactattataaggagcaaatacatggtgaaacaaaatcgtttagacatggtaagagattatcaaaatgctgtcaatcatgtcagaaaaaaaataccagataactataatcaaatagaattagttgatgaactcatgaatgatgatatagactattacatatctatttcaaaccgttctgacggaaaatcgttcaactatgtttcattctttatttatttagctataaaacttgatattaaatttactttattatcacgtcattatacattacgtgacgcttatcgtgattttattgaggaaatcatagacaaaaacccactattcaaatctaagcgtgtcacattcagaagcgctagggactatttagctatcatctatcaagataaggaaatcggtgtgattacagatttgaatagtgcaactgatttaaaatatcattctaactttttaaaacactaccctatcattatatatgatgaatttttagcacttgaagatgactatttaattgacgagtgggataagttaaaaacaatttatgaatcaatcgaccgtaaccatggtaatgttgattatatcggcttccctaaaatgtttttactaggtaatgctgtcaacttttcaagtcctatattatccaatttaaatatatataacttattacaaaaacataaaatgaacacatcacgactttacaaaaatatttttttagaaatgcgaagaaacgattacgtaaatgaaaagcgtaacacacgggcattcaattcaaacgatgacgctatgactactggcgagtttgaatttaacgaatataatttggcagatgataatttaagaaatcatatcaatcaaaacggtgattttttctatattaaaactgacgataaatatataaaaattatgtataatgttgatacatttaatgctaatattattgttataccttatacaaaacaatatgaattttgtactaaaatcaaagatatagatgacaatgttatttatttaagagaagatatgttttataaagaaaacatggagcgttattattacaatccaagcaatttacattttgataacgcttactcaaaaaattacgttgttgataatgatagatatttatatttagatatgaataaaattataaaatttcatataaaaaatgaaatgaagaaaaatatgagtgaatttgaaagaaaagaaaaaatatatgaagataactatattgaaaatacaaagaagtatttaatgaaacaatacggcttataaaaggtgtgtaagattatgggattactagaatgcatgcaatatcataaacatgaacgtcgaatgattttatactgggatatagaaacattagcgtacaataaagttaacggacgaaaaaaaccaaccaaatataaaaacgtaacgtattcagtagcaattggttggtttaatggttatgagattgatgtagaagtatttcctagttttgaatcgttttatgacgcattttatacgtatgtgaaacgacgtgatacaatcactaagtcaaaaacagatattatcatgattgcacataactgtaataagtatgacaaccattttttacttaaagataccatgcgttattttgataatatcacacgcgaaaatatatatttaaaatctgcagaagaaaacgaacacacactaaagatgcaagaggctactattttagctaaaaatcaaaatgtgattttagaaaaacgtgtgaaatcgtctattaatttagacttaacaatgtttttaaatggatttaaatttaatattattgataactttatgaaaaccaatacatcaattgcaacattaggtaaaaagttgcttgacggtggttatttaacagacgaccaacttaaaacagattttaattacacgatatttgataaagataacgatatgtcagatagtgaagcctatgactatgctgttaagtgttttgctaaactcacacctgaacaacttacatacattcataatgacgtgattatattaggtatgtgccatattcattatagtgatatatttccaaattttgactataacaaattaacattttcattgaatattatggaatcgtatttaaataatcaaatgacgcgttttcagttactcaatcaatatcaagatattaaaatatcatatacacattaccatttccatgatatgaatttttatgactatatcaaatcattttatcgtggtggtttaaatatgtataacactaaatacataaacaaacttattgatgagccttgtttttctattgatatcaattccagttatccttatgtgatgtatcatgagaaaattccgacatggttatacttttatgaacattattcagaacctacattaatccctacttttttagatgatgacaattatttttcattatataagattgataaagatgtatttaacaatgatttattaattaaaatcaaatcacgtgtattacgtcaaatgattgtaaaatactataataatgataatgattacgttaatattaatacaaatacattaagaataattcaagacattacgggtattgattgcacgcatatacgtgttaattcgtttgtgatatatgaatgtgaatactttcatgcacgtgatattatatttcaaaactattttattaaaacacaaggtaagttaaaaaacaaaatcaacatgacatcaccttacgactatcatattactgatgacatcaacgaacacccttactcaaatgaggaggttatgttgtctaaagttgtacttaacggattatatggcatacctgcattacgttcacattttaacttattccgtttagatgataacaatgaactatacaatattattaacggttacaaaaacacagaacgtaatattttattttctacatttgtaacatcacgttcattgtataacttattagtaccattccaatacttaacggaaagtgaaattgacgacaattttatttattgtgatactgatagtttgtatatgaaatccgttgttaaacccttattgaaccccagtttattcgacccgatagccttaggtaaatgggatattgaaaacgaacagatagataagatgtttgtactgaatcataaaaaatatgcatatgaagtgaatggaaagattaaaattgcttctgctggtatacctaaaagcgcctttgatacaagcgtcgattttgaaacctttgtacgtgaacaattctttgacggtgcgattatagaaaacaataaaagtatctataatgaacagggtacaatatcgatttatccgtctaaaacagaaattgtatgtggtaatgtatatgatgaatatttttctgatgaacttaatatgaaacgtgaatttatattaaaagacgctagagaaaattttgaccatagtcaatttgatgatattctttatattgaaagtgacattggttcgttttcacttaacgacttatttcctgttgaacgttcagttcataacaaatctgatttgcatatattaaaacgcgaacatgatgaattaaaaaaaggcaactgttaaataacagttgcctttttcttttgagataacatgaaaaatgtgtacgaaaattgattatgttttgtattttatttactagcattactagcatgtgttcattatagcatagttaattaagcaataccactgaagaatacaatattatcaccagcgttatgaggtacaccattaatcaatgtatataatacaacccgtgacggtgcgacgtatggtggtacgttatagtttgctactaagaatgaaccatcgtcaaatactgctacaacgacacctgtgtgaccaatgccatatgctgttgcttgtaagtatggtggtttacttgaaaaaccataaccaacagtagggttgtgtgttgtttttgcacctaactttttatagacgtaccatacacgttgaccgtttgtcacttgaccgtcgtctgtcggttgtcttttaccatgtaattgtgacatatacgcccatgttaattctgtacactgacctgcattacccgtttgaggaaatatgttacctggtttgtataaatattcttttttgaataaaggtacaccaattgcttttttatatttttctggtaactgtgcgtatgtccagttaccaccaatgacgcgaccacttttaccattaggtttgactgatttaccactaattggtttatggtctccgtcatcatcagtagggtttgaactactacccccactatctacttgcacgctatcaatcagtttttttaatgaatcgagtagcccaatcgtcattttaatatgatatgtgttgttaaatgttttttgtaatgtaaaataatcattactaaaaaatttgtcgctacctatactgtgtacatcccattgtaatgcgtcttgtactttttttaataattcttgcatggcttgttttgctaaagcgagcagtgaactaccactgtcaccactactaccactgtcagacgaatcactaggtgaaccacctttaccgtctaatttaccaccccacgcaagaatagtattcgcaccgtctaaaaaaggattaccatagttttgtactttattatatgacgctttcaaacctaggggataatatgccgcccaagtagccgctgctgttaatggaatatacgcacgtccgattgtacctgctttcatatttttagcaaaatctgcattaccttttctttgtacgtcttgcggtacaaaatgcactggattaccgtaatcataccaagacggttgtcctgcttgttttgattgtgatactaattttcttgcaatgaatttagcgtctgttaaatagtcacctcgtgcagatgtatggttcaaccaacctaaacccgcgctatacccttcatttttttcatatacagcaaaaagagtaggtgacacacctatctcttttactgcttttaatacttgtctgattttactttcattaccacctagccatacattaaagcgtccatacccttttactttagggactaactggtctatcgttaaaccgaaatcatcattaatatacgaatgcgtaaatttatctatcttctcttggtcgttcattattatcacccttttcagaatcgtttttaattactcttaatttatctttaatttgttctggtactaatacgtccatttctgcacaattttctacgatagataagccctcattagcgatataatagaaaatcgtaatcatgagtaagccaccttttaattgtaaaatctggtcaatgatgttagctaaaatgataatacagaatatcaataattttttagcaaaacctttcattgattttttagaccatagattattatttttaattgctttagcaaaaccagtaacaacatctataatcatcaaaacaaataaaaaatatagtaactttaaatcacctgcatatatgaacatatgaaatgcttctgtgtccgtaaatcttaattttacctcattcattttatacaccttctctaaatttattatttaacgggttctgtaacattggattacctgaaccgtcattatgccaaaatctcacaccagattctaaaattgcttttaattgttccattaacatggggtcaatgtcacgtatggtatacgtacctgtacattttaaatagttgcaaacagtcatactgttaattggttcaataaatgaattatagtcattcacttcaaaaccaaacaacatataatatttttgtaaaaatgtaatttctttaggtgacggtacactaattttcatcgttaaaccgttaatactgtttgcaatttggaatgcgttgcccatttccgactctgtcactgacggtggttgtaatgctaaatctttatattctgcttgttgttgtttgtagaaattatattcttcattaaacttaccaaataaagcagtcggacttaaattacttgctacacttacagcgtcataaaaacgtgattttgggtcactaccatttaatacattatctatacgacttgtgattaattgactttctgcattacgctgtctattggcttgttgtgattgtcctaaaattccgttattaattaatataggcacttgcgcaaaactattaaatgttatattggtatttaagaatgaacctgtatcaattaatatatctttatttttagcaagtatcggtctatcgttttcagcactgttataatcaactggatatactcgcacttcattatgataaccaatgatggattttgtacgtaacttaacacctgttttttgtgaaattttaccagcgtcaagtaacattgtgttaccgttccagtcataaaattcaatcgtcatgtactcattacgtatcatatgtttaaactcgtcttttttagacaacatcatctcttgaagctttgtgaaacttaatgataaatcgtttaaactccattcttttgattttccaccctgttttaatgtctttaatccagtaattttttcacttgtcttaacgtcctctaaatcttttgtattaataaaatctttaggtaacatttgaaccttttgaaagttttgtgtaatccatggatatgcactcattttatccataaagttaataaagtcaccatattccataacgtataagttgactggcgatgtgatattgtcatatatcgtacctttagacgtatctaagtttggctcttttttcgtaccaaatttctttgataaatcagcgcttgactggaataacactaaattttccaaatactgttgcatttggttatacacatagtttttatttgatacttttaacacatcatcattgttacgtaacatcggcaacatatagttatacgtacgctttgataagtgttgacgttcaatattaacgtttgaaagttgttctaatacattaccttgtgtatacgtcataatagtatcaatcacaaaatatatttttaccacaacatcattcacatattcgatttgattcacaaaagcgtaatagcgtctgtcctcaaaatctgataaaaacgtcatgtagttaatcccttgtgcgtcatgccactgcatatcaacattgatttccattctatcacgtataaaattatacggttgtttggaatagtctaatgatttaaaatgacgaccgtttaaaaaataatcatcacgctctttattactattaaaatgaattgtattttgatagtctgtaaacggtgtgttatagaaaaatttaaaatttgttaattttctcatttttacctccataaaaaatagtcgtataaataatttatacgactattataacatttttattcaatgatttgtgtatctattgcaaaacgtttatctccatttgttaagtcactatcgctataatttgatgtaacaaaatgtaattcattattaaagtttaaatataatcttgtattaatcattttcgaatcaatcgcactttgtgtgtagtgatgtgttgattttaagttagcgttaatcgtacctaatttaatatcaccgtttttcttaatcccttttaataccccttttaattgtatggttttaacaccattaattgttacaatacgatattgcggtgcgggataaccaccgttgctatcacttgcaactataccactttctagcaatatatcttgccaacctgtatcattaaattgtaattttgcactgttgattttttgatcaaaattttgttcaatttctgatttagattgtgcaattttagtatctatatttaagttgtccactcttgttgataaagtgttaatacttgattcatttgttgatgttttttgttttaaatcattaatatcattatcatattttgataaatcaatatgtccgtttccgtcaacaactggtctatcttttaattcttgaatatctttttcaatttttgatattttatcattatttgtttttaaagcagcgatgtcagatttaattgaattaatatcctgtgtataatctttttggttaatactgtttaattttgtttctaactcttttatcttatcaaggttggcatttgctttgatgtcattaatggtttgttctaaactttcaagtttcccagcacttgaattttgttttaacttattaatatcctcttgtatttcttgaattgtgttgtcattgttttgtttagattttaataattcaatctgttgttcaatatcttttattttatcaagattgatactttttttaacttcagctaattctctttttaacgcgtcaatgttttctgcaccagtattagctttaattaaattaatttcatttgtgtttcgtcctacactatctttagtagcgtttaacgattgtgtaagtgtttcatatttatcatcatactgtaacattgatttttcaaattcatttaattgtgtttgatgttgttctaaactttcatttaatatgacatctttttcttttaatgaatcaatctcttttttattactatcaatcattggttggaatttttttattttctctagaaatgttgatattttctctttattatcattaattgcaatatcatgattttctatttgaccactgtatttattaatcaatgtttttaaatcattataaaatgttaatttataataaccagtatcagtacggacataaatatgtccgtctgatgtactgattaagtcattttcttctgttaaaaaatctgctaacctgtctattgtttcaacttgtcttaaacttcttacgattctatcagccattgttcacacctcttatttgtatcgtttccaactaaactcaaagaaaaaacctaaaatacccattatgagaacaccccccaaggaataccaacactgtaactattacctgttttaccgttccattgtctcactggtaaataataacgtgtaccttcccaattgtaaccaatccatacatacccgtctgataaacaaacttcgtcatatggtgtatagccgtttggttggaaccaatagccattaagctcagataatttcggactaccgacacgagcaaatattggtaaaaaaccacatgtaaatgtagcattttcatttctgtaatatgtgccgtattggttttgtttccagttgttagtttgttgaatatttttttctaatactttactatcactatttgaaaattttggacgaataaaatgcgtaacaccgtcataataatgtgttcttattgttgctttttcccaaccatcatatccaccatttaaccagttttgttctaagcatgtataataatcaagatttccacttgttacacattgaatatgcccatattgagaattagtgtatacagcaacgtcacataattgaggtttaaagctaggtgtattttcatacaccgctgctaaacctttaaagtcgttgttaatggcgtctttggcattaccccacatgcgaactttaccgtcagtaatgtaataaacataagcaactgctaagtccatacattgaaaaccatatactccatcaaagtcaactccaacaccctcatgcttatatatccattcttttgcttgttgttgtgatttcatgaaacattatcctttcttgacccaactatattgacgtttttttgtatctgcattaacgttactaaagaattctttatgttcggacacattagcctctaatgtttgtcttacttcaccgacagcgttaccacttgaaacacgtaaccatgcacccacttttttaatttcttctggtgcgtctctaaacaattccatttggttaccagtaatataatattcaccaggtgtcgtaacgtaagctatccagttattgtattgacttgcttctaaatactcttgatatggtgcgtctgttttgattgttgtccataaaccataatcccattttaatgtaaatacatcgagcgtcataccacgcatgattttaaccatttttcgaccagtagaaaaacgcgttaattcttgtactgtacctaatgtttgtgttgtagggtatacattgatgaaacaaccagcgtctataatttttttactaccattcattggcatatttttaagtttactagctgtaccaccgtcaatataatagaaccctgcttgtgttaagtcatttaagtcgtcaatatggtctggaattgataacgcacgtccatcgtcttttgttaatttatagttttgtgaacctctcgcacgtaatgcttcaaagtgttcatactcaccaagttgaaagaacccatataaattattgaatcgttttccaccaccgccattagtcatagcaagtaataacgatttacgttttgtttttggattggtataaatacaaataccctccggctctttaaagttatcacgtggaaaattaataccgtcttgatatgataatttaaacggataatcataaatcttttgaccagttgttaatgaatatttaccaatttgaacgtgtgaattaactgaactgttaccacttaaccagtataaatcatcaccatcaacggcaatcccttgcatccatcgattatcattgttttctgaattatcaatcgtcatttctttttctacattatcaatgtgattttttacgtcagctcttgaacgtacctgtattgtcccgtcaccgaatcttaaaacgattttgtcattttcttcatcaattaacggtgtaaacgtgtgtttgtttaaaagtgactgtggtgtataatctgttaaccctttagcctcttctaaatctaaaatataattatctttatatgcgacttgtaacagttttgctacaccgtcatgatgtaaccatattttcatttcaccgttagattgtctttctaaacctattgtagtaccgtgaccaccttgtacaatacgcatactagaaattaagtcaccgctaggcgttaatttattaatccaaaaaccttctgggttttgtgaatctgattgtgtagagtacatttgattcgtttctttatctatgtttatagattggttaacagcattacgaataccaccgaatcccataacaaactttggttcaagctcatttaattcaaaaccattaacaaaacggtcaatgtctttaattaagtctttaacttctgctttaaaatcattcatttgtttcatttctgcaactttaaataatgcaaatgcagatgtaagaccagtactatatttagtaaattcatcatgaataattttatctattgtaccgtcgtttaaccaacctctaaataagtctttcgcttggtctgggaatgctttcattaaatcgtcccagtttctaaaacgtttttttaactcaccgtcatagtcccaaatacgatgtgctaatacttcaatgagctttgataatcttgaaatataatcataatatgattttgaattggtattataatctgctctatcatcgtaaaacggtgtgtaacgttctctcgttttatatatttcgtctaaaaatggacgaatgtcgtcaaaatatttaaaatcgttttcattatatgccataattttccacctttaccaaatttgtaaaaaacattttttatcaaattcatttaaaattttctttcttaaatcgtatactttatcaatattatcaattaaatactgttttgaaaattgtgtacctttcgcattacctttttgattttgattacgttttgcgttttgattactttcgttacttgatttattcacagttttaccgttgtcaattgtattattatctgcaaatcgtaacgttgtgttatctacatctatgttaacctcgctttgtggtaatgacacataagcatttctgtttgctgtcatgccagttgaattgtctaaagatgttgcattttgatttgaagtttcatcagtgttgcttattgtatcttcgttgtgttctgtgaagccttgtgattgaagatatttttctacttcacttgatgaataaaccacattcaaataatcctcatgtgtgatacatacagtaatcacttgcatgccaaaagcttcaactgtttgtctgttgatttctctatctaaaaagtgtattgtaaatgattttttaaaaagtaagtcagataagtcatctttaagtttaaaacctttaaacactttttcattaacgatggctaaaacgtctttgtcaaacttcaacattttttgcatgaattgaaattcatcatcataaaacgttaatttatcattatttacaaattcattaaaaccttttttaattaattctgatttaataaaatcaaataaagtcattgtatatctagccattgtattcactactttcatcattagacaatgtatctatcattgtgatttctgatgtaacttcatcgtcgtaatacggtttaatatctaaaccatatcgttttgataagaatgtaataggttcacgaccttttaaataaatattactatttgatgtggtaaaacctcggttgctttttgcctcttcgtcagaaacaccgctttccttatccactgctagtgaattaatacctaaatagttacttaattcactaattttattttggtattcacgtttcatctcagttagtgctggaatcacactattactggttaaatctatgatatcatcatcggcgttaaacataggtgacattttaacaaatggtgcaccgttgtatatttccgatacaagttgattaactgactcatcattaatgtctgatttaaatattttgctaaattttgcttgcataattaatgagaatctagataaaacaacctcagataattcatcagtataatgttctataatttctatatcactattatattgaattggtttattttgcattacaacaaaattaccactcatacagttatcatatattttatgaatctgtaagcattcatctggtattaaatagtctggaacaatgaaataaatatcatcttttgttaatcgtttttgaaattgaaaattgaaatttgatgaaaagtttggggcttgattaaaataagtgttgttaacatagcccaaaatcataatttgttcatttcttgctttaccaacaacaacattaatgttttgccttaatgcagattctaattgaataaaatctataccaaccgtatcacgattggtatagtttattaataggggtaaaaattccaaataacgattaaacataagacgtttaaatctgttgcgatgttctacaacacgtttattgatttctttagataattcaacctgtacgcctttattatgtttagtcatttatatcacctctattattctgttctcggtgttacatcttggtcagtaattaaaattttgttaaagaatgggctaatggctttaaatgaatagtaatgaatccagtgtgtaacttcatcaaattcaccattatagaatggttgttttaacattccttttgtgtaacgtttatatttaattgaattaatatccaaaataaaagcgtataaatctgattttggtttaatttcttcaacgttagacttaaattcagataaatttgaaacatcataagtgaatactgaaccaactggaattgtatcacctttatgagtttgataatcaccgtaagcacgtaagaaattaactgattcgtcacttgatacgacaatatctttagtaactttaaaaactccacctaaatcatcaaaactaataacgtggtctgtaaagtcaatccctgctacttggaacgtgttcgcaatctttgtatctaaaagataagattttaagctatcagtcgttaatataacaatatcttttaattttgaaactgttgtatattgtccaatagcgccacctgaagcacgatgaacttcattatatttagcactgttgttttgtaagttaagaatagcttcaaaaactttacttgctaaatcttcttttgatgttgctttacgtacatttgattcagataattgattcaatgaataatcaactaacattgcacgcatttctttttcttctaatacgttaatatcagaaattttctttttatagacacctaatgcataattagttgcgtctgctaatgtttggaaattaaagcgtgtatcattgttatttaatgtgaatttttgtttcttcacaataccactaccatataacttagtagccatacgtggataattacgttttaacattaattcttcatttttagataaatccatgttaataggtactgtgtccataattacatattcttcactgtattgaccaataaagtcctgctctttagctaaccaattaaaacgattacctaatgcaatatcgattaataacgtttcattaatcttagggaataaaaatttatttacaaatgtttcaaacattgtattagaattatcccacttatcgccaaacgtccatgattttgaataagtatgattaaagtcttgtaatgcagatttagctgactgtgcaactaatagtgctgtttcgttttttgtactcttttctgccatgatttattattcctcctctacatcgccagtgaatgactgttttgaaagtgaatgaatttgtacaccataactatcttcacttttgtttgtatcaattgacatattttcatttaattctgttcgtttatttaatcttgaatcttcatatgatgtgcccatcatagaacgcatattgttaccctcatacatgtttaaattcctcctaatctaaatctaacttatccactaattcttcatctgaataatctttgtcgttgtcatctgcttcagtaacatctggttgtggttgtggttgtggttgtggttgttgcatttgtgatgtttcaaaattagtaaatcgttgttctaatgaagcgatacgttgttctaaaacaacagggtctaattttgcactatcttcatcagtaatagtaggttctaatttgttttcattttcttcttcaattgtttctactgattcactttcagacgattcttcagtttcttctgttgattcttcagttgattcttcagttgattctgaagaatcttctttctcgtcaggttttataatttcttcaaattcagtcattaatacacacctccaaatattttatatcttattatatcatagaatatttaaataagtaaattaaaattattttaagttcaaatcataaattttgataaaagtcaatagatacataaattttgtatttgatgaatatgttataggttagataagttggaaaagtagacgtacagtttttataagtttagtaaagaaatgataagtgaatttataagttttgatttgtataatcgtttattttaaacggtgggga

SEQ ID NO: 129 - DNA, 18122 bp, Rosenblumvirus sp.
  source 1..18122: mol_type = genomic DNA
gggaaaaagtttttgtaaaattacacctccccaccgtttaaaataaacgattatacaaatcaaaacttataaattcacttatcatttctttactaaacttataaaaactgtacgtctacttttccaacttatctaacctataacatattcatcaaatacaaaatttatgtatctattgacttttatcaaaatttatgatttgtatttaaaatctaatttcttctattaaatagtatttttaaattatttaaacttttttaagaaaaaccattgacaaaacttttaaacgtttgctatactatgtatgtaatcaaatcaaggaggtaacaaatggaaaatgtacaacctttacaaacttacattttaaaaaatggtaatatagttattgttatgggtaatacatcaacttatgaattaacattatttgtacttgaaaaggatgattttgaacaattagaccataattcacttaaaaaaatcgttgatgaaataaggaatgaaatcaatgatttaaggagtgataataatggttaatgttgataacgcacctgaagaaaaagggcaagcctatactgaaatgttgcaactattcaataagttgattcaatggaatccagcttatactttcgacaatgctattaatttagtatcagcttgccaacaactattattaaactataatagttctgttgttaaattcttaaatgatgaactaaacaacgaaactaaaccagaatctattttatcttacattgctggtgatgacccaatagaacaatggaatatgcacaaaggattttatgaaacgtataacgtttacgttttttagaaaggagtgatataataatgaaacctgatgatattgttacattacgaataaaaggttatattcttcattatttagatgataaaaatgaatatgttgaagaatttatcccacttcacgagtatcatttatcaaaatcacaagctaaagacttattacctaatacacacaaacttttatccactacacgacatactaaaactatgcaagtttattacaatgatttactacaaattgcaattgcagaaagcaaataatttaaataagaggagaaataaaaatgacaaacgtaaaagatattttatcaagacaccaaaacacattagcgagattcgaatttgaggaaaaagaaagagaatttatcaaactatcagaattagtagaaaaatacggtatgaaaaaagagtatatcgttagagcattattcacaaacaaagaatcaaaattcggtgtacaaggtgttatcgtcactgacgactataacgtaaacttaccgaatcacttaactgaattaattaaagacatgcgtcaagacgaggacgttgttaacattatcaatgctggtgaagttcaattcacaatttatgagtatgaaaataaaaaaggtcaaaaaggttattcaatcaactttggtcaagtatcattttaatacaatttcataggggatatttatcccctatttttatgaggtgctaaacaatggaaaaaatatacactgccgtattattatacaatgtatcaattaatgaaacatatgaacatgaaattgaacaattcgaaaaaataaataaagctaaggtaatatatagttattttgatgcaaacttttataaaaaaggtgcttataatctttgtgtaaaatacattaaggagatataaaaatgaatattacaacaatattaaacacaaaaaaattaattaattatattttagataatagagattgttttatgaataaaataacaaaatttgaatcactaagtggaaaatgtgttgtttttgttagatacggtgaaatttctattgaatactatgatagtgatacaaaatacaatgatttatttactttagacattgacgttgatgttcgtacatatagttttagttgtcttgaggttttttatcgagaacatttaaacccattatataaaaaagaagtttttatggattgtactattgatgacgtattagaatatttcgagaaaccaatagaaagtaatataacaataatttttcaaaacaaagtgatatataataacgggaacgtgatagaacatgactaatatattaaacatagctattgttttccttttagcatttttaattacacttgtaatacttatgacaatgcatatacgtgtgtcatttggtgttttatttactacattgattatattctacattatctttttagtggttatatatgggttatatggaggtcgttagcaatggttagacatacgtccgaaatggataaatggaaaaaagaaagagacgcaagaaaagagcaggaaaaagaattgtttttaaatgattttagtactgttaattttaaatttgatgataaagatttacaagaggcgtacatagacgcatggaaacatttcgcacatttgccctattttccaaaagaaagaaacgtgtcatatgtaaatgctgtatcattggtaagaggtaaaagacatgaacaattaaactatatacttgaaatatataaccgtaaagatgaatctaataataaaaacgctaaaaaacataaatatgctttatatgaattacaagctaaaaataataattcttctatgtataaatatattaaagaaattgacactttatacaaagaaattggtaaatcagacagaccagtgactactattgatgatgaagatgtgaggtataactttttatattatgcaacatttgaagactaattttaatactgtaaacgacatcataaactattataaggagcaaatacatggtgaaacaaaatcgtttagacatggtaagagattatcaaaatgctgtcaatcatgtcagaaaaaaaataccagataactataatcaaatagaattagttgatgaactcatgaatgatgatatagactattacatatctatttcaaaccgttctgacggaaaatcgttcaactatgtttcattctttatttatttagctataaaacttgatattaaatttactttattatcacgtcattatacattacgtgacgcttatcgtgattttattgaggaaatcatagacaaaaacccactattcaaatctaagcgtgtcacattcagaagcgctagggactatttagctatcatctatcaagataaggaaatcggtgtgattacagatttgaatagtgcaactgatttaaaatatcattctaactttttaaaacactaccctatcattatatatgatgaatttttagcacttgaagatgactatttaattgacgagtgggataagttaaaaacaatttatgaatcaatcgaccgtaaccatggtaatgttgattatatcggcttccctaaaatgtttttactaggtaatgctgtcaacttttcaagtcctatattatccaatttaaatatatataacttattacaaaaacataaaatgaacacatcacgactttacaaaaatatttttttagaaatgcgaagaaacgattacgtaaatgaaaagcgtaacacacgggcattcaattcaaacgatgacgctatgactactggcgagtttgaatttaacgaatataatttggcagatgataatttaagaaatcatatcaatcaaaacggtgattttttctatattaaaactgacgataaatatataaaaattatgtataatgttgatacatttaatgctaatattattgttataccttatacaaaacaatatgaattttgtactaaaatcaaagatatagatgacaatgttatttatttaagagaagatatgttttataaagaaaacatggagcgttattattacaatccaagcaatttacattttgataacgcttactcaaaaaattacgttgttgataatgatagatatttatatttagatatgaataaaattataaaatttcatataaaaaatgaaatgaagaaaaatatgagtgaatttgaaagaaaagaaaaaatatatgaagataactatattgaaaatacaaagaagtatttaatgaaacaatacggcttataaaaggtgtgtaagattatgggattactagaatgcatgcaatatcataaacatgaacgtcgaatgattttatactgggatatagaaacattagcgtacaataaagttaacggacgaaaaaaaccaaccaaatataaaaacgtaacgtattcagtagcaattggttggtttaatggttatgagattgatgtagaagtatttcctagttttgaatcgttttatgacgcattttatacgtatgtgaaacgacgtgatacaatcactaagtcaaaaacagatattatcatgattgcacataactgtaataagtatgacaaccattttttacttaaagataccatgcgttattttgataatatcacacgcgaaaatatatatttaaaatctgcagaagaaaacgaacacacactaaagatgcaagaggctactattttagctaaaaatcaaaatgtgattttagaaaaacgtgtgaaatcgtctattaatttagacttaacaatgtttttaaatggatttaaatttaatattattgataactttatgaaaaccaatacatcaattgcaacattaggtaaaaagttgcttgacggtggttatttaacagacgaccaacttaaaacagattttaattacacgatatttgataaagataacgatatgtcagatagtgaagcctatgactatgctgttaagtgttttgctaaactcacacctgaacaacttacatacattcataatgacgtgattatattaggtatgtgccatattcattatagtgatatatttccaaattttgactataacaaattaacattttcattgaatattatggaatcgtatttaaataatcaaatgacgcgttttcagttactcaatcaatatcaagatattaaaatatcatatacacattaccatttccatgatatgaatttttatgactatatcaaatcattttatcgtggtggtttaaatatgtataacactaaatacataaacaaacttattgatgagccttgtttttctattgatatcaattccagttatccttatgtgatgtatcatgagaaaattccgacatggttatacttttatgaacattattcagaacctacattaatccctacttttttagatgatgacaattatttttcattatataagattgataaagatgtatttaacaatgatttattaattaaaatcaaatcacgtgtattacgtcaaatgattgtaaaatactataataatgataatgattacgttaatattaatacaaatacattaagaataattcaagacattacgggtattgattgcacgcatatacgtgttaattcgtttgtgatatatgaatgtgaatactttcatgcacgtgatattatatttcaaaactattttattaaaacacaaggtaagttaaaaaacaaaatcaacatgacatcaccttacgactatcatattactgatgacatcaacgaacacccttactcaaatgaggaggttatgttgtctaaagttgtacttaacggattatatggcatacctgcattacgttcacattttaacttattccgtttagatgataacaatgaactatacaatattattaacggttacaaaaacacagaacgtaatattttattttctacatttgtaacatcacgttcattgtataacttattagtaccattccaatacttaacggaaagtgaaattgacgacaattttatttattgtgatactgatagtttgtatatgaaatccgttgttaaacccttattgaaccccagtttattcgacccgatagccttaggtaaatgggatattgaaaacgaacagatagataagatgtttgtactgaatcataaaaaatatgcatatgaagtgaatggaaagattaaaattgcttctgctggtatacctaaaagcgcctttgatacaagcgtcgattttgaaacctttgtacgtgaacaattctttgacggtgcgattatagaaaacaataaaagtatctataatgaacagggtacaatatcgatttatccgtctaaaacagaaattgtatgtggtaatgtatatgatgaatatttttctgatgaacttaatatgaaacgtgaatttatattaaaagacgctagagaaaattttgaccatagtcaatttgatgatattctttatattgaaagtgacattggttcgttttcacttaacgacttatttcctgttgaacgttcagttcataacaaatctgatttgcatatattaaaacgcgaacatgatgaattaaaaaaaggcaactgttaaataacagttgcctttttcttttgagataacatgaaaaatgtgtacgaaaattgattatgttttgtattttatttactagcattactagcatgtgttcattatagcatagttaattaagcaataccactgaagaatacaatattatcaccagcgttatgaggtacaccattaatcaatgtatataatacaacccgtgacggtgcgacgtatggtggtacgttatagtttgctactaagaatgaaccatcgtcaaatactgctacaacgacacctgtgtgaccaatgccatatgctgttgcttgtaagtatggtggtttacttgaaaaaccataaccaacagtagggttgtgtgttgtttttgcacctaactttttatagacgtaccatacacgttgaccgtttgtcacttgaccgtcgtctgtcggttgtcttttaccatgtaattgtgacatatacgcccatgttaattctgtacactgacctgcattacccgtttgaggaaatatgttacctggtttgtataaatattcttttttgaataaaggtacaccaattgcttttttatatttttctggtaactgtgcgtatgtccagttaccaccaatgacgcgaccacttttaccattaggtttgactgatttaccactaattggtttatggtctccgtcatcatcagtagggtttgaactactacccccactatctacttgcacgctatcaatcagtttttttaatgaatcgagtagcccaatcgtcattttaatatgatatgtgttgttaaatgttttttgtaatgtaaaataatcattactaaaaaatttgtcgctacctatactgtgtacatcccattgtaatgcgtcttgtactttttttaataattcttgcatggcttgttttgctaaagcgagcagtgaactaccactgtcaccactactaccactgtcagacgaatcactaggtgaaccacctttaccgtctaatttaccaccccacgcaagaatagtattcgcaccgtctaaaaaaggattaccatagttttgtactttattatatgacgctttcaaacctaggggataatatgccgcccaagtagccgctgctgttaatggaatatacgcacgtccgattgtacctgctttcatatttttagcaaaatctgcattaccttttctttgtacgtcttgcggtacaaaatgcactggattaccgtaatcataccaagacggttgtcctgcttgttttgattgtgatactaattttcttgcaatgaatttagcgtctgttaaatagtcacctcgtgcagatgtatggttcaaccaacctaaacccgcgctatacccttcatttttttcatatacagcaaaaagagtaggtgacacacctatctcttttactgcttttaatacttgtctgattttactttcattaccacctagccatacattaaagcgtccatacccttttactttagggactaactggtctatcgttaaaccgaaatcatcattaatatacgaatgcgtaaatttatctatcttctcttggtcgttcattattatcacccttttcagaatcgtttttaattactcttaatttatctttaatttgttctggtactaatacgtccatttctgcacaattttctacgatagataagccctcattagcgatataatagaaaatcgtaatcatgagtaagccaccttttaattgtaaaatctggtcaatgatgttagctaaaatgataatacagaatatcaataattttttagcaaaacctttcattgattttttagaccatagattattatttttaattgctttagcaaaaccagtaacaacatctataatcatcaaaacaaataaaaaatatagtaactttaaatcacctgcatatatgaacatatgaaatgcttctgtgtccgtaaatcttaattttacctcattcattttatacaccttctctaaatttattatttaacgggttctgtaacattggattacctgaaccgtcattatgccaaaatctcacaccagattctaaaattgcttttaattgttccattaacatggggtcaatgtcacgtatggtatacgtacctgtacattttaaatagttgcaaacagtcatactgttaattggttcaataaatgaattatagtcattcacttcaaaaccaaacaacatataatatttttgtaaaaatgtaatttctttaggtgacggtacactaattttcatcgttaaaccgttaatactgtttgcaatttggaatgcgttgcccatttccgactctgtcactgacggtggttgtaatgctaaatctttatattctgcttgttgttgtttgtagaaattatattcttcattaaacttaccaaataaagcagtcggacttaaattacttgctacacttacagcgtcataaaaacgtgattttgggtcactaccatttaatacattatctatacgacttgtgattaattgactttctgcattacgctgtctattggcttgttgtgattgtcctaaaattccgttattaattaatataggcacttgcgcaaaactattaaatgttatattggtatttaagaatgaacctgtatcaattaatatatctttatttttagcaagtatcggtctatcgttttcagcactgttataatcaactggatatactcgcacttcattatgataaccaatgatggattttgtacgtaacttaacacctgttttttgtgaaattttaccagcgtcaagtaacattgtgttaccgttccagtcataaaattcaatcgtcatgtactcattacgtatcatatgtttaaactcgtcttttttagacaacatcatctcttgaagctttgtgaaacttaatgataaatcgtttaaactccattcttttgattttccaccctgttttaatgtctttaatccagtaattttttcacttgtcttaacgtcctctaaatcttttgtattaataaaatctttaggtaacatttgaaccttttgaaagttttgtgtaatccatggatatgcactcattttatccataaagttaataaagtcaccatattccataacgtataagttgactggcgatgtgatattgtcatatatcgtacctttagacgtatctaagtttggctcttttttcgtaccaaatttctttgataaatcagcgcttgactggaataacactaaattttccaaatactgttgcatttggttatacacatagtttttatttgatacttttaacacatcatcattgttacgtaacatcggcaacatatagttatacgtacgctttgataagtgttgacgttcaatattaacgtttgaaagttgttctaatacattaccttgtgtatacgtcataatagtatcaatcacaaaatatatttttaccacaacatcattcacatattcgatttgattcacaaaagcgtaatagcgtctgtcctcaaaatctgataaaaacgtcatgtagttaatcccttgtgcgtcatgccactgcatatcaacattgatttccattctatcacgtataaaattatacggttgtttggaatagtctaatgatttaaaatgacgaccgtttaaaaaataatcatcacgctctttattactattaaaatgaattgtattttgatagtctgtaaacggtgtgttatagaaaaatttaaaatttgttaattttctcatttttacctccataaaaaatagtcgtataaataatttatacgactattataacatttttattcaatgatttgtgtatctattgcaaaacgtttatctccatttgttaagtcactatcgctataatttgatgtaacaaaatgtaattcattattaaagtttaaatataatcttgtattaatcattttcgaatcaatcgcactttgtgtgtagtgatgtgttgattttaagttagcgttaatcgtacctaatttaatatcaccgtttttcttaatcccttttaataccccttttaattgtatggttttaacaccattaattgttacaatacgatattgcggtgcgggataaccaccgttgctatcacttgcaactataccactttctagcaatatatcttgccaacctgtatcattaaattgtaattttgcactgttgattttttgatcaaaattttgttcaatttctgatttagattgtgcaattttagtatctatatttaagttgtccactcttgttgataaagtgttaatacttgattcatttgttgatgttttttgttttaaatcattaatatcattatcatattttgataaatcaatatgtccgtttccgtcaacaactggtctatcttttaattcttgaatatctttttcaatttttgatattttatcattatttgtttttaaagcagcgatgtcagatttaattgaattaatatcctgtgtataatctttttggttaatactgtttaattttgtttctaactcttttatcttatcaaggttggcatttgctttgatgtcattaatggtttgttctaaactttcaagtttcccagcacttgaattttgttttaacttattaatatcctcttgtatttcttgaattgtgttgtcattgttttgtttagattttaataattcaatctgttgttcaatatcttttattttatcaagattgatactttttttaacttcagctaattctctttttaacgcgtcaatgttttctgcaccagtattagctttaattaaattaatttcatttgtgtttcgtcctacactatctttagtagcgtttaacgattgtgtaagtgtttcatatttatcatcatactgtaacattgatttttcaaattcatttaattgtgtttgatgttgttctaaactttcatttaatatgacatctttttcttttaatgaatcaatctcttttttattactatcaatcattggttggaatttttttattttctctagaaatgttgatattttctctttattatcattaattgcaatatcatgattttctatttgaccactgtatttattaatcaatgtttttaaatcattataaaatgttaatttataataaccagtatcagtacggacataaatatgtccgtctgatgtactgattaagtcattttcttctgttaaaaaatctgctaacctgtctattgtttcaacttgtcttaaacttcttacgattctatcagccattgttcacacctcttatttgtatcgtttccaactaaactcaaagaaaaaacctaaaatacccattatgagaacaccccccaaggaataccaacactgtaactattacctgttttaccgttccattgtctcactggtaaataataacgtgtaccttcccaattgtaaccaatccatacatacccgtctgataaacaaacttcgtcatatggtgtatagccgtttggttggaaccaatagccattaagctcagataatttcggactaccgacacgagcaaatattggtaaaaaaccacatgtaaatgtagcattttcatttctgtaatatgtgccgtattggttttgtttccagttgttagtttgttgaatatttttttctaatactttactatcactatttgaaaattttggacgaataaaatgcgtaacaccgtcataataatgtgttcttattgttgctttttcccaaccatcatatccaccatttaaccagttttgttctaagcatgtataataatcaagatttccacttgttacacattgaatatgcccatattgagaattagtgtatacagcaacgtcacataattgaggtttaaagctaggtgtattttcatacaccgctgctaaacctttaaagtcgttgttaatggcgtctttggcattaccccacatgcgaactttaccgtcagtaatgtaataaacataagcaactgctaagtccatacattgaaaaccatatactccatcaaagtcaactccaacaccctcatgcttatatatccattcttttgcttgttgttgtgatttcatgaaacattatcctttcttgacccaactatattgacgtttttttgtatctgcattaacgttactaaagaattctttatgttcggacacattagcctctaatgtttgtcttacttcaccgacagcgttaccacttgaaacacgtaaccatgcacccacttttttaatttcttctggtgcgtctctaaacaattccatttggttaccagtaatataatattcaccaggtgtcgtaacgtaagctatccagttattgtattgacttgcttctaaatactcttgatatggtgcgtctgttttgattgttgtccataaaccataatcccattttaatgtaaatacatcgagcgtcataccacgcatgattttaaccatttttcgaccagtagaaaaacgcgttaattcttgtactgtacctaatgtttgtgttgtagggtatacattgatgaaacaaccagcgtctataatttttttactaccattcattggcatatttttaagtttactagctgtaccaccgtcaatataatagaaccctgcttgtgttaagtcatttaagtcgtcaatatggtctggaattgataacgcacgtccatcgtcttttgttaatttatagttttgtgaacctctcgcacgtaatgcttcaaagtgttcatactcaccaagttgaaagaacccatataaattattgaatcgttttccaccaccgccattagtcatagcaagtaataacgatttacgttttgtttttggattggtataaatacaaataccctccggctctttaaagttatcacgtggaaaattaataccgtcttgatatgataatttaaacggataatcataaatcttttgaccagttgttaatgaatatttaccaatttgaacgtgtgaattaactgaactgttaccacttaaccagtataaatcatcaccatcaacggcaatcccttgcatccatcgattatcattgttttctgaattatcaatcgtcatttctttttctacattatcaatgtgattttttacgtcagctcttgaacgtacctgtattgtcccgtcaccgaatcttaaaacgattttgtcattttcttcatcaattaacggtgtaaacgtgtgtttgtttaaaagtgactgtggtgtataatctgttaaccctttagcctcttctaaatctaaaatataattatctttatatgcgacttgtaacagttttgctacaccgtcatgatgtaaccatattttcatttcaccgttagattgtctttctaaacctattgtagtaccgtgaccaccttgtacaatacgcatactagaaattaagtcaccgctaggcgttaatttattaatccaaaaaccttctgggttttgtgaatctgattgtgtagagtacatttgattcgtttctttatctatgtttatagattggttaacagcattacgaataccaccgaatcccataacaaactttggttcaagctcatttaattcaaaaccattaacaaaacggtcaatgtctttaattaagtctttaacttctgctttaaaatcattcatttgtttcatttctgcaactttaaataatgcaaatgcagatgtaagaccagtactatatttagtaaattcatcatgaataattttatctattgtaccgtcgtttaaccaacctctaaataagtctttcgcttggtctgggaatgctttcattaaatcgtcccagtttctaaaacgtttttttaactcaccgtcatagtcccaaatacgatgtgctaatacttcaatgagctttgataatcttgaaatataatcataatatgattttgaattggtattataatctgctctatcatcgtaaaacggtgtgtaacgttctctcgttttatatatttcgtctaaaaatggacgaatgtcgtcaaaatatttaaaatcgttttcattatatgccataattttccacctttaccaaatttgtaaaaaacattttttatcaaattcatttaaaattttctttcttaaatcgtatactttatcaatattatcaattaaatactgttttgaaaattgtgtacctttcgcattacctttttgattttgattacgttttgcgttttgattactttcgttacttgatttattcacagttttaccgttgtcaattgtattattatctgcaaatcgtaacgttgtgttatctacatctatgttaacctcgctttgtggtaatgacacataagcatttctgtttgctgtcatgccagttgaattgtctaaagatgttgcattttgatttgaagtttcatcagtgttgcttattgtatcttcgttgtgttctgtgaagccttgtgattgaagatatttttctacttcacttgatgaataaaccacattcaaataatcctcatgtgtgatacatacagtaatcacttgcatgccaaaagcttcaactgtttgtctgttgatttctctatctaaaaagtgtattgtaaatgattttttaaaaagtaagtcagataagtcatctttaagtttaaaacctttaaacactttttcattaacgatggctaaaacgtctttgtcaaacttcaacattttttgcatgaattgaaattcatcatcataaaacgttaatttatcattatttacaaattcattaaaaccttttttaattaattctgatttaataaaatcaaataaagtcattgtatatctagccattgtattcactactttcatcattagacaatgtatctatcattgtgatttctgatgtaacttcatcgtcgtaatacggtttaatatctaaaccatatcgttttgataagaatgtaataggttcacgaccttttaaataaatattactatttgatgtggtaaaacctcggttgctttttgcctcttcgtcagaaacaccgctttccttatccactgctagtgaattaatacctaaatagttacttaattcactaattttattttggtattcacgtttcatctcagttagtgctggaatcacactattactggttaaatctatgatatcatcatcggcgttaaacataggtgacattttaacaaatggtgcaccgttgtatatttccgatacaagttgattaactgactcatcattaatgtctgatttaaatattttgctaaattttgcttgcataattaatgagaatctagataaaacaacctcagataattcatcagtataatgttctataatttctatatcactattatattgaattggtttattttgcattacaacaaaattaccactcatacagttatcatatattttatgaatctgtaagcattcatctggtattaaatagtctggaacaatgaaataaatatcatcttttgttaatcgtttttgaaattgaaaattgaaatttgatgaaaagtttggggcttgattaaaataagtgttgttaacatagcccaaaatcataatttgttcatttcttgctttaccaacaacaacattaatgttttgccttaatgcagattctaattgaataaaatctataccaaccgtatcacgattggtatagtttattaataggggtaaaaattccaaataacgattaaacataagacgtttaaatctgttgcgatgttctacaacacgtttattgatttctttagataattcaacctgtacgcctttattatgtttagtcatttatatcacctctattattctgttctcggtgttacatcttggtcagtaattaaaattttgttaaagaatgggctaatggctttaaatgaatagtaatgaatccagtgtgtaacttcatcaaattcaccattatagaatggttgttttaacattccttttgtgtaacgtttatatttaattgaattaatatccaaaataaaagcgtataaatctgattttggtttaatttcttcaacgttagacttaaattcagataaatttgaaacatcataagtgaatactgaaccaactggaattgtatcacctttatgagtttgataatcaccgtaagcacgtaagaaattaactgattcgtcacttgatacgacaatatctttagtaactttaaaaactccacctaaatcatcaaaactaataacgtggtctgtaaagtcaatccctgctacttggaacgtgttcgcaatctttgtatctaaaagataagattttaagctatcagtcgttaatataacaatatcttttaattttgaaactgttgtatattgtccaatagcgccacctgaagcacgatgaacttcattatatttagcactgttgttttgtaagttaagaatagcttcaaaaactttacttgctaaatcttcttttgatgttgctttacgtacatttgattcagataattgattcaatgaataatcaactaacattgcacgcatttctttttcttctaatacgttaatatcagaaattttctttttatagacacctaatgcataattagttgcgtctgctaatgtttggaaattaaagcgtgtatcattgttatttaatgtgaatttttgtttcttcacaataccactaccatataacttagtagccatacgtggataattacgttttaacattaattcttcatttttagataaatccatgttaataggtactgtgtccataattacatattcttcactgtattgaccaataaagtcctgctctttagctaaccaattaaaacgattacctaatgcaatatcgattaataacgtttcattaatcttagggaataaaaatttatttacaaatgtttcaaacattgtattagaattatcccacttatcgccaaacgtccatgattttgaataagtatgattaaagtcttgtaatgcagatttagctgactgtgcaactaatagtgctgtttcgttttttgtactcttttctgccatgatttattattcctcctctacatcgccagtgaatgactgttttgaaagtgaatgaatttgtacaccataactatcttcacttttgtttgtatcaattgacatattttcatttaattctgttcgtttatttaatcttgaatcttcatatgatgtgcccatcatagaacgcatattgttaccctcatacatgtttaaattcctcctaatctaaatctaacttatccactaattcttcatctgaataatctttgtcgttgtcatctgcttcagtaacatctggttgtggttgtggttgtggttgtggttgttgcatttgtgatgtttcaaaattagtaaatcgttgttctaatgaagcgatacgttgttctaaaacaacagggtctaattttgcactatcttcatcagtaatagtaggttctaatttgttttcattttcttcttcaattgtttctactgattcactttcagacgattcttcagtttcttctgttgattcttcagttgattcttcagttgattctgaagaatcttctttctcgtcaggttttataatttcttcaaattcagtcattaatacacacctccaaatattttatatcttattatatcatagaatatttaaataagtaaattaaaattattttaagttcaaatcataaattttgataaaagtcaatagatacataaattttgtatttgatgaatatgttataggttagataagttggaaaagtagacgtacagtttttataagtttagtaaagaaatgataagtgaatttataagttttgatttgtataatcgtttattttaaacggtggggagg

SEQ ID NO: 130 - DNA, 18130 bp, Rosenblumvirus sp.
  source 1..18130: mol_type = genomic DNA
gggaaaaagtttttgtaaaattacacctccccaccgtttaaaataaacgattatacaaatcaaaacttataaattcacttatcatttctttactaaacttataaaaactgtacgtctacttttccaacttatctaacctataacatattcatcaaatacaaaatttatgtatctattgacttttatcaaaatttatgatttgaacttaaaataattttaatttacttatttaaatattctatgatataataagatataaaatatttggaggtgtgtattaatgactgaatttgaagaaattataaaacctgacgagaaagaagattcttcagaatcaactgaagaatcaactgaagaatcaacagaagaaactgaagaatcgtctgaaagtgaatcagtagaaacaattgaagaagaaaatgaaaacaaattagaacctactattactgatgaagatagtgcaaaattagaccctgttgttttagaacaacgtatcgcttcattagaacaacgatttactaattttgaaacatcacaaatgcaacaaccacaaccacaaccacaaccacaaccagatgttactgaagcagatgacaacgacaaagattattcagatgaagaattagtggataagttagatttagattaggaggaatttaaacatgtatgagggtaacaatatgcgttctatgatgggcacatcatatgaagattcaagattaaataaacgaacagaattaaatgaaaatatgtcaattgatacaaacaaaagtgaagatagttatggtgtacaaattcattcactttcaaaacagtcattcactggcgatgtagaggaggaataataaatcatggcagaaaagagtacaaaaaacgaaacagcactattagttgcacagtcagctaaatctgcattacaagactttaatcatacttattcaaaatcatggacgtttggcgataagtgggataattctaatacaatgtttgaaacatttgtaaataaatttttattccctaagattaatgaaacgttattaatcgatattgcattaggtaatcgttttaattggttagctaaagagcaggactttattggtcaatacagtgaagaatatgtaattatggacacagtacctattaacatggatttatctaaaaatgaagaattaatgttaaaacgtaattatccacgtatggctactaagttatatggtagtggtattgtgaagaaacaaaaattcacattaaataacaatgatacacgctttaatttccaaacattagcagacgcaactaattatgcattaggtgtctataaaaagaaaatttctgatattaacgtattagaagaaaaagaaatgcgtgcaatgttagttgattattcattgaatcaattatctgaatcaaatgtacgtaaagcaacatcaaaagaagatttagcaagtaaagtttttgaagctattcttaacttacaaaacaacagtgctaaatataatgaagttcatcgtgcttcaggtggcgctattggacaatatacaacagtttcaaaattaaaagatattgttatattaacgactgatagcttaaaatcttatcttttagatacaaagattgcgaacacgttccaagtagcagggattgactttacagaccacgttattagttttgatgatttaggtggagtttttaaagttactaaagatattgtcgtatcaagtgacgaatcagttaatttcttacgtgcttacggtgattatcaaactcataaaggtgatacaattccagttggttcagtattcacttatgatgtttcaaatttatctgaatttaagtctaacgttgaagaaattaaaccaaaatcagatttatacgcttttattttggatattaattcaattaaatataaacgttacacaaaaggaatgttaaaacaaccattctataatggtgaatttgatgaagttacacactggattcattactattcatttaaagccattagcccattctttaacaaaattttaattactgaccaagatgtaacaccgagaacagaataatagaggtgatataaatgactaaacataataaaggcgtacaggttgaattatctaaagaaatcaataaacgtgttgtagaacatcgcaacagatttaaacgtcttatgtttaatcgttatttggaatttttacccctattaataaactataccaatcgtgatacggttggtatagattttattcaattagaatctgcattaaggcaaaacattaatgttgttgttggtaaagcaagaaatgaacaaattatgattttgggctatgttaacaacacttattttaatcaagccccaaacttttcatcaaatttcaattttcaatttcaaaaacgattaacaaaagatgatatttatttcattgttccagactatttaataccagatgaatgcttacagattcataaaatatatgataactgtatgagtggtaattttgttgtaatgcaaaataaaccaattcaatataatagtgatatagaaattatagaacattatactgatgaattatctgaggttgttttatctagattctcattaattatgcaagcaaaatttagcaaaatatttaaatcagacattaatgatgagtcagttaatcaacttgtatcggaaatatacaacggtgcaccatttgttaaaatgtcacctatgtttaacgccgatgatgatatcatagatttaaccagtaatagtgtgattccagcactaactgagatgaaacgtgaataccaaaataaaattagtgaattaagtaactatttaggtattaattcactagcagtggataaggaaagcggtgtttctgacgaagaggcaaaaagcaaccgaggttttaccacatcaaatagtaatatttatttaaaaggtcgtgaacctattacattcttatcaaaacgatatggtttagatattaaaccgtattacgacgatgaagttacatcagaaatcacaatgatagatacattgtctaatgatgaaagtagtgaatacaatggctagatatacaatgactttatttgattttattaaatcagaattaattaaaaaaggttttaatgaatttgtaaataatgataaattaacgttttatgatgatgaatttcaattcatgcaaaaaatgttgaagtttgacaaagacgttttagccatcgttaatgaaaaagtgtttaaaggttttaaacttaaagatgacttatctgacttactttttaaaaaatcatttacaatacactttttagatagagaaatcaacagacaaacagttgaagcttttggcatgcaagtgattactgtatgtatcacacatgaggattatttgaatgtggtttattcatcaagtgaagtagaaaaatatcttcaatcacaaggcttcacagaacacaacgaagatacaataagcaacactgatgaaacttcaaatcaaaatgcaacatctttagacaattcaactggcatgacagcaaacagaaatgcttatgtgtcattaccacaaagcgaggttaacatagatgtagataacacaacgttacgatttgcagataataatacaattgacaacggtaaaactgtgaataaatcaagtaacgaaagtaatcaaaacgcaaaacgtaatcaaaatcaaaaaggtaatgcgaaaggtacacaattttcaaaacagtatttaattgataatattgataaagtatacgatttaagaaagaaaattttaaatgaatttgataaaaaatgttttttacaaatttggtaaaggtggaaaattatggcatataatgaaaacgattttaaatattttgacgacattcgtccatttttagacgaaatatataaaacgagagaacgttacacaccgttttacgatgatagagcagattataataccaattcaaaatcatattatgattatatttcaagattatcaaagctcattgaagtattagcacatcgtatttgggactatgacggtgagttaaaaaaacgttttagaaactgggacgatttaatgaaagcattcccagaccaagcgaaagacttatttagaggttggttaaacgacggtacaatagataaaattattcatgatgaatttactaaatatagtactggtcttacatctgcatttgcattatttaaagttgcagaaatgaaacaaatgaatgattttaaagcagaagttaaagacttaattaaagacattgaccgttttgttaatggttttgaattaaatgagcttgaaccaaagtttgttatgggattcggtggtattcgtaatgctgttaaccaatctataaacatagataaagaaacgaatcaaatgtactctacacaatcagattcacaaaacccagaaggtttttggattaataaattaacgcctagcggtgacttaatttctagtatgcgtattgtacaaggtggtcacggtactacaataggtttagaaagacaatctaacggtgaaatgaaaatatggttacatcatgacggtgtagcaaaactgttacaagtcgcatataaagataattatattttagatttagaagaggctaaagggttaacagattatacaccacagtcacttttaaacaaacacacgtttacaccgttaattgatgaagaaaatgacaaaatcgttttaagattcggtgacgggacaatacaggtacgttcaagagctgacgtaaaaaatcacattgataatgtagaaaaagaaatgacgattgataattcagaaaacaatgataatcgatggatgcaagggattgccgttgatggtgatgatttatactggttaagtggtaacagttcagttaattcacacgttcaaattggtaaatattcattaacaactggtcaaaagatttatgattatccgtttaaattatcatatcaagacggtattaattttccacgtgataactttaaagagccggagggtatttgtatttataccaatccaaaaacaaaacgtaaatcgttattacttgctatgactaatggcggtggtggaaaacgattcaataatttatatgggttctttcaacttggtgagtatgaacactttgaagcattacgtgcgagaggttcacaaaactataaattaacaaaagacgatggacgtgcgttatcaattccagaccatattgacgacttaaatgacttaacacaagcagggttctattatattgacggtggtacagctagtaaacttaaaaatatgccaatgaatggtagtaaaaaaattatagacgctggttgtttcatcaatgtataccctacaacacaaacattaggtacagtacaagaattaacgcgtttttctactggtcgaaaaatggttaaaatcatgcgtggtatgacgctcgatgtatttacattaaaatgggattatggtttatggacaacaatcaaaacagacgcaccatatcaagagtatttagaagcaagtcaatacaataactggatagcttacgttacgacacctggtgaatattatattactggtaaccaaatggaattgtttagagacgcaccagaagaaattaaaaaagtgggtgcatggttacgtgtttcaagtggtaacgctgtcggtgaagtaagacaaacattagaggctaatgtgtccgaacataaagaattctttagtaacgttaatgcagatacaaaaaaacgtcaatatagttgggtcaagaaaggataatgtttcatgaaatcacaacaacaagcaaaagaatggatatataagcatgagggtgttggagttgactttgatggagtatatggttttcaatgtatggacttagcagttgcttatgtttattacattactgacggtaaagttcgcatgtggggtaatgccaaagacgccattaacaacgactttaaaggtttagcagcggtgtatgaaaatacacctagctttaaacctcaattatgtgacgttgctgtatacactaattctcaatatgggcatattcaatgtgtaacaagtggaaatcttgattattatacatgcttagaacaaaactggttaaatggtggatatgatggttgggaaaaagcaacaataagaacacattattatgacggtgttacgcattttattcgtccaaaattttcaaatagtgatagtaaagtattagaaaaaaatattcaacaaactaacaactggaaacaaaaccaatacggcacatattacagaaatgaaaatgctacatttacatgtggttttttaccaatatttgctcgtgtcggtagtccgaaattatctgagcttaatggctattggttccaaccaaacggctatacaccatatgacgaagtttgtttatcagacgggtatgtatggattggttacaattgggaaggtacacgttattatttaccagtgagacaatggaacggtaaaacaggtaatagttacagtgttggtattccttggggggtgttctcataatgggtattttaggttttttctttgagtttagttggaaacgatacaaataagaggtgtgaacaatggctgatagaatcgtaagaagtttaagacaagttgaaacaatagacaggttagcagattttttaacagaagaaaatgacttaatcagtacatcagacggacatatttatgtccgtactgatactggttattataaattaacattttataatgatttaaaaacattgattaataaatacagtggtcaaatagaaaatcatgatattgcaattaatgataataaagagaaaatatcaacatttctagagaaaataaaaaaattccaaccaatgattgatagtaataaaaaagagattgattcattaaaagaaaaagatgtcatattaaatgaaagtttagaacaacatcaaacacaattaaatgaatttgaaaaatcaatgttacagtatgatgataaatatgaaacacttacacaatcgttaaacgctactaaagatagtgtaggacgaaacacaaatgaaattaatttaattaaagctaatactggtgcagaaaacattgacgcgttaaaaagagaattagctgaagttaaaaaaagtatcaatcttgataaaataaaagatattgaacaacagattgaattattaaaatctaaacaaaacaatgacaacacaattcaagaaatacaagaggatattaataagttaaaacaaaattcaagtgctgggaaacttgaaagtttagaacaaaccattaatgacatcaaagcaaatgccaaccttgataagataaaagagttagaaacaaaattaaacagtattaaccaaaaagattatacacaggatattaattcaattaaatctgacatcgctgctttaaaaacaaataatgataaaatatcaaaaattgaaaaagatattcaagaattaaaagatagaccagttgttgacggaaacggacatattgatttatcaaaatatgataatgatattaatgatttaaaacaaaaaacatcaacaaatgaatcaagtattaacactttatcaacaagagtggacaacttaaatatagatactaaaattgcacaatctaaatcagaaattgaacaaaattttgatcaaaaaatcaacagtgcaaaattacaatttaatgatacaggttggcaagatatattgctagaaagtggtatagttgcaagtgatagcaacggtggttatcccgcaccgcaatatcgtattgtaacaattaatggtgttaaaaccatacaattaaaaggggtattaaaagggattaagaaaaacggtgatattaaattaggtacgattaacgctaacttaaaatcaacacatcactacacacaaagtgcgattgattcgaaaatgattaatacaagattatatttaaactttaataatgaattacattttgttacatcaaattatagcgatagtgacttaacaaatggagataaacgttttgcaatagatacacaaatcattgaataaaaatgttataatagtcgtataaattatttatacgactattttttatggaggtaaaaatgagaaaattaacaaattttaaatttttctataacacaccgtttacagactatcaaaatacaattcattttaatagtaataaagagcgtgatgattattttttaaacggtcgtcattttaaatcattagactattccaaacaaccgtataattttatacgtgatagaatggaaatcaatgttgatatgcagtggcatgacgcacaagggattaactacatgacgtttttatcagattttgaggacagacgctattacgcttttgtgaatcaaatcgaatatgtgaatgatgttgtggtaaaaatatattttgtgattgatactattatgacgtatacacaaggtaatgtattagaacaactttcaaacgttaatattgaacgtcaacacttatcaaagcgtacgtataactatatgttgccgatgttacgtaacaatgatgatgtgttaaaagtatcaaataaaaactatgtgtataaccaaatgcaacagtatttggaaaatttagtgttattccagtcaagcgctgatttatcaaagaaatttggtacgaaaaaagagccaaacttagatacgtctaaaggtacgatatatgacaatatcacatcgccagtcaacttatacgttatggaatatggtgactttattaactttatggataaaatgagtgcatatccatggattacacaaaactttcaaaaggttcaaatgttacctaaagattttattaatacaaaagatttagaggacgttaagacaagtgaaaaaattactggattaaagacattaaaacagggtggaaaatcaaaagaatggagtttaaacgatttatcattaagtttcacaaagcttcaagagatgatgttgtctaaaaaagacgagtttaaacatatgatacgtaatgagtacatgacgattgaattttatgactggaacggtaacacaatgttacttgacgctggtaaaatttcacaaaaaacaggtgttaagttacgtacaaaatccatcattggttatcataatgaagtgcgagtatatccagttgattataacagtgctgaaaacgatagaccgatacttgctaaaaataaagatatattaattgatacaggttcattcttaaataccaatataacatttaatagttttgcgcaagtgcctatattaattaataacggaattttaggacaatcacaacaagccaatagacagcgtaatgcagaaagtcaattaatcacaagtcgtatagataatgtattaaatggtagtgacccaaaatcacgtttttatgacgctgtaagtgtagcaagtaatttaagtccgactgctttatttggtaagtttaatgaagaatataatttctacaaacaacaacaagcagaatataaagatttagcattacaaccaccgtcagtgacagagtcggaaatgggcaacgcattccaaattgcaaacagtattaacggtttaacgatgaaaattagtgtaccgtcacctaaagaaattacatttttacaaaaatattatatgttgtttggttttgaagtgaatgactataattcatttattgaaccaattaacagtatgactgtttgcaactatttaaaatgtacaggtacgtataccatacgtgacattgaccccatgttaatggaacaattaaaagcaattttagaatctggtgtgagattttggcataatgacggttcaggtaatccaatgttacagaacccgttaaataataaatttagagaaggtgtataaaatgaatgaggtaaaattaagatttacggacacagaagcatttcatatgttcatatatgcaggtgatttaaagttactatattttttatttgttttgatgattatagatgttgttactggttttgctaaagcaattaaaaataataatctatggtctaaaaaatcaatgaaaggttttgctaaaaaattattgatattctgtattatcattttagctaacatcattgaccagattttacaattaaaaggtggcttactcatgattacgattttctattatatcgctaatgagggcttatctatcgtagaaaattgtgcagaaatggacgtattagtaccagaacaaattaaagataaattaagagtaattaaaaacgattctgaaaagggtgataataatgaacgaccaagagaagatagataaatttacgcattcgtatattaatgatgatttcggtttaacgatagaccagttagtccctaaagtaaaagggtatggacgctttaatgtatggctaggtggtaatgaaagtaaaatcagacaagtattaaaagcagtaaaagagataggtgtgtcacctactctttttgctgtatatgaaaaaaatgaagggtatagcgcgggtttaggttggttgaaccatacatctgcacgaggtgactatttaacagacgctaaattcattgcaagaaaattagtatcacaatcaaaacaagcaggacaaccgtcttggtatgattacggtaatccagtgcattttgtaccgcaagacgtacaaagaaaaggtaatgcagattttgctaaaaatatgaaagcaggtacaatcggacgtgcgtatattccattaacagcagcggctacttgggcggcatattatcccctaggtttgaaagcgtcatataataaagtacaaaactatggtaatccttttttagacggtgcgaatactattcttgcgtggggtggtaaattagacggtaaaggtggttcacctagtgattcgtctgacagtggtagtagtggtgacagtggtagttcactgctcgctttagcaaaacaagccatgcaagaattattaaaaaaagtacaagacgcattacaatgggatgtacacagtataggtagcgacaaattttttagtaatgattattttacattacaaaaaacatttaacaacacatatcatattaaaatgacgattgggctactcgattcattaaaaaaactgattgatagcgtgcaagtagatagtgggggtagtagttcaaaccctactgatgatgacggagaccataaaccaattagtggtaaatcagtcaaacctaatggtaaaagtggtcgcgtcattggtggtaactggacatacgcacagttaccagaaaaatataaaaaagcaattggtgtacctttattcaaaaaagaatatttatacaaaccaggtaacatatttcctcaaacgggtaatgcaggtcagtgtacagaattaacatgggcgtatatgtcacaattacatggtaaaagacaaccgacagacgacggtcaagtgacaaacggtcaacgtgtatggtacgtctataaaaagttaggtgcaaaaacaacacacaaccctactgttggttatggtttttcaagtaaaccaccatacttacaagcaacagcatatggcattggtcacacaggtgtcgttgtagcagtatttgacgatggttcattcttagtagcaaactataacgtaccaccatacgtcgcaccgtcacgggttgtattatatacattgattaatggtgtacctcataacgctggtgataatattgtattcttcagtggtattgcttaattaactatgctataatgaacacatgctagtaatgctagtaaataaaatacaaaacataatcaattttcgtacacatttttcatgttatctcaaaagaaaaaggcaactgttatttaacagttgcctttttttaattcatcatgttcgcgttttaatatatgcaaatcagatttgttatgaactgaacgttcaacaggaaataagtcgttaagtgaaaacgaaccaatgtcactttcaatataaagaatatcatcaaattgactatggtcaaaattttctctagcgtcttttaatataaattcacgtttcatattaagttcatcagaaaaatattcatcatatacattaccacatacaatttctgttttagacggataaatcgatattgtaccctgttcattatagatacttttattgttttctataatcgcaccgtcaaagaattgttcacgtacaaaggtttcaaaatcgacgcttgtatcaaaggcgcttttaggtataccagcagaagcaattttaatctttccattcacttcatatgcatattttttatgattcagtacaaacatcttatctatctgttcgttttcaatatcccatttacctaaggctatcgggtcgaataaactggggttcaataagggtttaacaacggatttcatatacaaactatcagtatcacaataaataaaattgtcgtcaatttcactttccgttaagtattggaatggtactaataagttatacaatgaacgtgatgttacaaatgtagaaaataaaatattacgttctgtgtttttgtaaccgttaataatattgtatagttcattgttatcatctaaacggaataagttaaaatgtgaacgtaatgcaggtatgccatataatccgttaagtacaactttagacaacataacctcctcatttgagtaagggtgttcgttgatgtcatcagtaatatgatagtcgtaaggtgatgtcatgttgattttgttttttaacttaccttgtgttttaataaaatagttttgaaatataatatcacgtgcatgaaagtattcacattcatatatcacaaacgaattaacacgtatatgcgtgcaatcaatacccgtaatgtcttgaattattcttaatgtatttgtattaatattaacgtaatcattatcattattatagtattttacaatcatttgacgtaatacacgtgatttgattttaattaataaatcattgttaaatacatctttatcaatcttatataatgaaaaataattgtcatcatctaaaaaagtagggattaatgtaggttctgaataatgttcataaaagtataaccatgtcggaattttctcatgatacatcacataaggataactggaattgatatcaatagaaaaacaaggctcatcaataagtttgtttatgtatttagtgttatacatatttaaaccaccacgataaaatgatttgatatagtcataaaaattcatatcatggaaatggtaatgtgtatatgatattttaatatcttgatattgattgagtaactgaaaacgcgtcatttgattatttaaatacgattccataatattcaatgaaaatgttaatttgttatagtcaaaatttggaaatatatcactataatgaatatggcacatacctaatataatcacgtcattatgaatgtatgtaagttgttcaggtgtgagtttagcaaaacacttaacagcatagtcataggcttcactatctgacatatcgttatctttatcaaatatcgtgtaattaaaatctgttttaagttggtcgtctgttaaataaccaccgtcaagcaactttttacctaatgttgcaattgatgtattggttttcataaagttatcaataatattaaatttaaatccatttaaaaacattgttaagtctaaattaatagacgatttcacacgtttttctaaaatcacattttgatttttagctaaaatagtagcctcttgcatctttagtgtgtgttcgttttcttctgcagattttaaatatatattttcgcgtgtgatattatcaaaataacgcatggtatctttaagtaaaaaatggttgtcatacttattacagttatgtgcaatcatgataatatctgtttttgacttagtgattgtatcacgtcgtttcacatacgtataaaatgcgtcataaaacgattcaaaactaggaaatacttctacatcaatctcataaccattaaaccaaccaattgctactgaatacgttacgtttttatatttggttggtttttttcgtccgttaactttattgtacgctaatgtttctatatcccagtataaaatcattcgacgttcatgtttatgatattgcatgcattctagtaatcccataatcttacacaccttttataagccgtattgtttcattaaatacttctttgtattttcaatatagttatcttcatatattttttcttttctttcaaattcactcatatttttcttcatttcattttttatatgaaattttataattttattcatatctaaatataaatatctatcattatcaacaacgtaattttttgagtaagcgttatcaaaatgtaaattgcttggattgtaataataacgctccatgttttctttataaaacatatcttctcttaaataaataacattgtcatctatatctttgattttagtacaaaattcatattgttttgtataaggtataacaataatattagcattaaatgtatcaacattatacataatttttatatatttatcgtcagttttaatatagaaaaaatcaccgttttgattgatatgatttcttaaattatcatctgccaaattatattcgttaaattcaaactcgccagtagtcatagcgtcatcgtttgaattgaatgcccgtgtgttacgcttttcatttacgtaatcgtttcttcgcatttctaaaaaaatatttttgtaaagtcgtgatgtgttcattttatgtttttgtaataagttatatatatttaaattggataatataggacttgaaaagttgacagcattacctagtaaaaacattttagggaagccgatataatcaacattaccatggttacggtcgattgattcataaattgtttttaacttatcccactcgtcaattaaatagtcatcttcaagtgctaaaaattcatcatatataatgatagggtagtgttttaaaaagttagaatgatattttaaatcagttgcactattcaaatctgtaatcacaccgatttccttatcttgatagatgatagctaaatagtccctagcgcttctgaatgtgacacgcttagatttgaatagtgggtttttgtctatgatttcctcaataaaatcacgataagcgtcacgtaatgtataatgacgtgataataaagtaaatttaatatcaagttttatagctaaataaataaagaatgaaacatagttgaacgattttccgtcagaacggtttgaaatagatatgtaatagtctatatcatcattcatgagttcatcaactaattctatttgattatagttatctggtattttttttctgacatgattgacagcattttgataatctcttaccatgtctaaacgattttgtttcaccatgtatttgctccttataatagtttatgatgtcgtttacagtattaaaattagtcttcaaatgttgcataatataaaaagttatacctcacatcttcatcatcaatagtagtcactggtctgtctgatttaccaatttctttgtataaagtgtcaatttctttaatatatttatacatagaagaattattatttttagcttgtaattcatataaagcatatttatgttttttagcgtttttattattagattcatctttacggttatatatttcaagtatatagtttaattgttcatgtcttttacctcttaccaatgatacagcatttacatatgacacgtttctttcttttggaaaatagggcaaatgtgcgaaatgtttccatgcgtctatgtacgcctcttgtaaatctttatcatcaaatttaaaattaacagtactaaaatcatttaaaaacaattctttttcctgctcttttcttgcgtctctttcttttttccatttatccatttcggacgtatgtctaaccattgctaacgacctccatataacccatatataaccactaaaaagataatgtagaatataatcaatgtagtaaataaaacaccaaatgacacacgtatatgcattgtcataagtattacaagtgtaattaaaaatgctaaaaggaaaacaatagctatgtttaatatattagtcatgttctatcacgttcccgttattatatatcactttgttttgaaaaattattgttatattactttctattggtttctcgaaatattctaatacgtcatcaatagtacaatccataaaaacttcttttttatataatgggtttaaatgttctcgataaaaaacctcaagacaactaaaactatatgtacgaacatcaacgtcaatgtctaaagtaaataaatcattgtattttgtatcactatcatagtattcaatagaaatttcaccgtatctaacaaaaacaacacattttccacttagtgattcaaattttgttattttattcataaaacaatctctattatctaaaatataattaattaatttttttgtgtttaatattgttgtaatattcatttttatatctccttaatgtattttacacaaagattataagcaccttttttataaaagtttgcatcaaaataactatatattaccttagctttatttattttttcgaattgttcaatttcatgttcatatgtttcattaattgatacattgtataataatacggcagtgtatattttttccattgtttagcacctcataaaaataggggataaatatcccctatgaaattgtattaaaatgatacttgaccaaagttgattgaataacctttttgaccttttttattttcatactcataaattgtgaattgaacttcaccagcattgataatgttaacaacgtcctcgtcttgacgcatgtctttaattaattcagttaagtgattcggtaagtttacgttatagtcgtcagtgacgataacaccttgtacaccgaattttgattctttgtttgtgaataatgctctaacgatatactcttttttcataccgtatttttctactaattctgatagtttgataaattctctttctttttcctcaaattcgaatctcgctaatgtgttttggtgtcttgataaaatatcttttacgtttgtcatttttatttctcctcttatttaaattatttgctttctgcaattgcaatttgtagtaaatcattgtaataaacttgcatagttttagtatgtcgtgtagtggataaaagtttgtgtgtattaggtaataagtctttagcttgtgattttgataaatgatactcgtgaagtgggataaattcttcaacatattcatttttatcatctaaataatgaagaatataaccttttattcgtaatgtaacaatatcatcaggtttcattattatatcactcctttctaaaaaacgtaaacgttatacgtttcataaaatcctttgtgcatattccattgttctattgggtcatcaccagcaatgtaagataaaatagattctggtttagtttcgttgtttagttcatcatttaagaatttaacaacagaactattatagtttaataatagttgttggcaagctgatactaaattaatagcattgtcgaaagtataagctggattccattgaatcaacttattgaatagttgcaacatttcagtataggcttgccctttttcttcaggtgcgttatcaacattaaccattattatcactccttaaatcattgatttcattccttatttcatcaacgatttttttaagtgaattatggtctaattgttcaaaatcatccttttcaagtacaaataatgttaattcataagttgatgtattacccataacaataactatattaccattttttaaaatgtaagtttgtaaaggttgtacattttccatttgttacctccttgatttgattacatacatagtatagcaaacgtttaaaagttttgtcaatggtttttcttaaaaaagtttaaataatttaaaaatactatttaatagaagaaattagattttaaatacaaatcataaattttgataaaagtcaatagatacataaattttgtatttgatgaatatgttataggttagataagttggaaaagtagacgtacagtttttataagtttagtaaagaaatgataagtgaatttataagttttgatttgtataatcgtttattttaaacggtggggaggtgtaattt

SEQ ID NO: 131 - DNA, 18060 bp, Rosenblumvirus sp.
  source 1..18060: mol_type = genomic DNA
aaacttataaattcacttatcatttctttactaaacttataaaaactgtacgtctacttttccaacttatctaacctataacatattcatcaaatacaaaatttatgtatctattgacttttatcaaaatttatgatttgtatttaaaatctaatttcttctattaaatagtatttttaaattatttaaacttttttaagaaaaaccattgacaaaacttttaaacgtttgctatactatgtatgtaatcaaatcaaggaggtaacaaatggaaaatgtacaacctttacaaacttacattttaaaaaatggtaatatagttattgttatgggtaatacatcaacttatgaattaacattatttgtacttgaaaaggatgattttgaacaattagaccataattcacttaaaaaaatcgttgatgaaataaggaatgaaatcaatgatttaaggagtgataataatggttaatgttgataacgcacctgaagaaaaagggcaagcctatactgaaatgttgcaactattcaataagttgattcaatggaatccagcttatactttcgacaatgctattaatttagtatcagcttgccaacaactattattaaactataatagttctgttgttaaattcttaaatgatgaactaaacaacgaaactaaaccagaatctattttatcttacattgctggtgatgacccaatagaacaatggaatatgcacaaaggattttatgaaacgtataacgtttacgttttttagaaaggagtgatataataatgaaacctgatgatattgttacattacgaataaaaggttatattcttcattatttagatgataaaaatgaatatgttgaagaatttatcccacttcacgagtatcatttatcaaaatcacaagctaaagacttattacctaatacacacaaacttttatccactacacgacatactaaaactatgcaagtttattacaatgatttactacaaattgcaattgcagaaagcaaataatttaaataagaggagaaataaaaatgacaaacgtaaaagatattttatcaagacaccaaaacacattagcgagattcgaatttgaggaaaaagaaagagaatttatcaaactatcagaattagtagaaaaatacggtatgaaaaaagagtatatcgttagagcattattcacaaacaaagaatcaaaattcggtgtacaaggtgttatcgtcactgacgactataacgtaaacttaccgaatcacttaactgaattaattaaagacatgcgtcaagacgaggacgttgttaacattatcaatgctggtgaagttcaattcacaatttatgagtatgaaaataaaaaaggtcaaaaaggttattcaatcaactttggtcaagtatcattttaatacaatttcataggggatatttatcccctatttttatgaggtgctaaacaatggaaaaaatatacactgccgtattattatacaatgtatcaattaatgaaacatatgaacatgaaattgaacaattcgaaaaaataaataaagctaaggtaatatatagttattttgatgcaaacttttataaaaaaggtgcttataatctttgtgtaaaatacattaaggagatataaaaatgaatattacaacaatattaaacacaaaaaaattaattaattatattttagataatagagattgttttatgaataaaataacaaaatttgaatcactaagtggaaaatgtgttgtttttgttagatacggtgaaatttctattgaatactatgatagtgatacaaaatacaatgatttatttactttagacattgacgttgatgttcgtacatatagttttagttgtcttgaggttttttatcgagaacatttaaacccattatataaaaaagaagtttttatggattgtactattgatgacgtattagaatatttcgagaaaccaatagaaagtaatataacaataatttttcaaaacaaagtgatatataataacgggaacgtgatagaacatgactaatatattaaacatagctattgttttccttttagcatttttaattacacttgtaatacttatgacaatgcatatacgtgtgtcatttggtgttttatttactacattgattatattctacattatctttttagtggttatatatgggttatatggaggtcgttagcaatggttagacatacgtccgaaatggataaatggaaaaaagaaagagacgcaagaaaagagcaggaaaaagaattgtttttaaatgattttagtactgttaattttaaatttgatgataaagatttacaagaggcgtacatagacgcatggaaacatttcgcacatttgccctattttccaaaagaaagaaacgtgtcatatgtaaatgctgtatcattggtaagaggtaaaagacatgaacaattaaactatatacttgaaatatataaccgtaaagatgaatctaataataaaaacgctaaaaaacataaatatgctttatatgaattacaagctaaaaataataattcttctatgtataaatatattaaagaaattgacactttatacaaagaaattggtaaatcagacagaccagtgactactattgatgatgaagatgtgaggtataactttttatattatgcaacatttgaagactaattttaatactgtaaacgacatcataaactattataaggagcaaatacatggtgaaacaaaatcgtttagacatggtaagagattatcaaaatgctgtcaatcatgtcagaaaaaaaataccagataactataatcaaatagaattagttgatgaactcatgaatgatgatatagactattacatatctatttcaaaccgttctgacggaaaatcgttcaactatgtttcattctttatttatttagctataaaacttgatattaaatttactttattatcacgtcattatacattacgtgacgcttatcgtgattttattgaggaaatcatagacaaaaacccactattcaaatctaagcgtgtcacattcagaagcgctagggactatttagctatcatctatcaagataaggaaatcggtgtgattacagatttgaatagtgcaactgatttaaaatatcattctaactttttaaaacactaccctatcattatatatgatgaatttttagcacttgaagatgactatttaattgacgagtgggataagttaaaaacaatttatgaatcaatcgaccgtaaccatggtaatgttgattatatcggcttccctaaaatgtttttactaggtaatgctgtcaacttttcaagtcctatattatccaatttaaatatatataacttattacaaaaacataaaatgaacacatcacgactttacaaaaatatttttttagaaatgcgaagaaacgattacgtaaatgaaaagcgtaacacacgggcattcaattcaaacgatgacgctatgactactggcgagtttgaatttaacgaatataatttggcagatgataatttaagaaatcatatcaatcaaaacggtgattttttctatattaaaactgacgataaatatataaaaattatgtataatgttgatacatttaatgctaatattattgttataccttatacaaaacaatatgaattttgtactaaaatcaaagatatagatgacaatgttatttatttaagagaagatatgttttataaagaaaacatggagcgttattattacaatccaagcaatttacattttgataacgcttactcaaaaaattacgttgttgataatgatagatatttatatttagatatgaataaaattataaaatttcatataaaaaatgaaatgaagaaaaatatgagtgaatttgaaagaaaagaaaaaatatatgaagataactatattgaaaatacaaagaagtatttaatgaaacaatacggcttataaaaggtgtgtaagattatgggattactagaatgcatgcaatatcataaacatgaacgtcgaatgattttatactgggatatagaaacattagcgtacaataaagttaacggacgaaaaaaaccaaccaaatataaaaacgtaacgtattcagtagcaattggttggtttaatggttatgagattgatgtagaagtatttcctagttttgaatcgttttatgacgcattttatacgtatgtgaaacgacgtgatacaatcactaagtcaaaaacagatattatcatgattgcacataactgtaataagtatgacaaccattttttacttaaagataccatgcgttattttgataatatcacacgcgaaaatatatatttaaaatctgcagaagaaaacgaacacacactaaagatgcaagaggctactattttagctaaaaatcaaaatgtgattttagaaaaacgtgtgaaatcgtctattaatttagacttaacaatgtttttaaatggatttaaatttaatattattgataactttatgaaaaccaatacatcaattgcaacattaggtaaaaagttgcttgacggtggttatttaacagacgaccaacttaaaacagattttaattacacgatatttgataaagataacgatatgtcagatagtgaagcctatgactatgctgttaagtgttttgctaaactcacacctgaacaacttacatacattcataatgacgtgattatattaggtatgtgccatattcattatagtgatatatttccaaattttgactataacaaattaacattttcattgaatattatggaatcgtatttaaataatcaaatgacgcgttttcagttactcaatcaatatcaagatattaaaatatcatatacacattaccatttccatgatatgaatttttatgactatatcaaatcattttatcgtggtggtttaaatatgtataacactaaatacataaacaaacttattgatgagccttgtttttctattgatatcaattccagttatccttatgtgatgtatcatgagaaaattccgacatggttatacttttatgaacattattcagaacctacattaatccctacttttttagatgatgacaattatttttcattatataagattgataaagatgtatttaacaatgatttattaattaaaatcaaatcacgtgtattacgtcaaatgattgtaaaatactataataatgataatgattacgttaatattaatacaaatacattaagaataattcaagacattacgggtattgattgcacgcatatacgtgttaattcgtttgtgatatatgaatgtgaatactttcatgcacgtgatattatatttcaaaactattttattaaaacacaaggtaagttaaaaaacaaaatcaacatgacatcaccttacgactatcatattactgatgacatcaacgaacacccttactcaaatgaggaggttatgttgtctaaagttgtacttaacggattatatggcatacctgcattacgttcacattttaacttattccgtttagatgataacaatgaactatacaatattattaacggttacaaaaacacagaacgtaatattttattttctacatttgtaacatcacgttcattgtataacttattagtaccattccaatacttaacggaaagtgaaattgacgacaattttatttattgtgatactgatagtttgtatatgaaatccgttgttaaacccttattgaaccccagtttattcgacccgatagccttaggtaaatgggatattgaaaacgaacagatagataagatgtttgtactgaatcataaaaaatatgcatatgaagtgaatggaaagattaaaattgcttctgctggtatacctaaaagcgcctttgatacaagcgtcgattttgaaacctttgtacgtgaacaattctttgacggtgcgattatagaaaacaataaaagtatctataatgaacagggtacaatatcgatttatccgtctaaaacagaaattgtatgtggtaatgtatatgatgaatatttttctgatgaacttaatatgaaacgtgaatttatattaaaagacgctagagaaaattttgaccatagtcaatttgatgatattctttatattgaaagtgacattggttcgttttcacttaacgacttatttcctgttgaacgttcagttcataacaaatctgatttgcatatattaaaacgcgaacatgatgaattaaaaaaaggcaactgttaaataacagttgcctttttcttttgagataacatgaaaaatgtgtacgaaaattgattatgttttgtattttatttactagcattactagcatgtgttcattatagcatagttaattaagcaataccactgaagaatacaatattatcaccagcgttatgaggtacaccattaatcaatgtatataatacaacccgtgacggtgcgacgtatggtggtacgttatagtttgctactaagaatgaaccatcgtcaaatactgctacaacgacacctgtgtgaccaatgccatatgctgttgcttgtaagtatggtggtttacttgaaaaaccataaccaacagtagggttgtgtgttgtttttgcacctaactttttatagacgtaccatacacgttgaccgtttgtcacttgaccgtcgtctgtcggttgtcttttaccatgtaattgtgacatatacgcccatgttaattctgtacactgacctgcattacccgtttgaggaaatatgttacctggtttgtataaatattcttttttgaataaaggtacaccaattgcttttttatatttttctggtaactgtgcgtatgtccagttaccaccaatgacgcgaccacttttaccattaggtttgactgatttaccactaattggtttatggtctccgtcatcatcagtagggtttgaactactacccccactatctacttgcacgctatcaatcagtttttttaatgaatcgagtagcccaatcgtcattttaatatgatatgtgttgttaaatgttttttgtaatgtaaaataatcattactaaaaaatttgtcgctacctatactgtgtacatcccattgtaatgcgtcttgtactttttttaataattcttgcatggcttgttttgctaaagcgagcagtgaactaccactgtcaccactactaccactgtcagacgaatcactaggtgaaccacctttaccgtctaatttaccaccccacgcaagaatagtattcgcaccgtctaaaaaaggattaccatagttttgtactttattatatgacgctttcaaacctaggggataatatgccgcccaagtagccgctgctgttaatggaatatacgcacgtccgattgtacctgctttcatatttttagcaaaatctgcattaccttttctttgtacgtcttgcggtacaaaatgcactggattaccgtaatcataccaagacggttgtcctgcttgttttgattgtgatactaattttcttgcaatgaatttagcgtctgttaaatagtcacctcgtgcagatgtatggttcaaccaacctaaacccgcgctatacccttcatttttttcatatacagcaaaaagagtaggtgacacacctatctcttttactgcttttaatacttgtctgattttactttcattaccacctagccatacattaaagcgtccatacccttttactttagggactaactggtctatcgttaaaccgaaatcatcattaatatacgaatgcgtaaatttatctatcttctcttggtcgttcattattatcacccttttcagaatcgtttttaattactcttaatttatctttaatttgttctggtactaatacgtccatttctgcacaattttctacgatagataagccctcattagcgatataatagaaaatcgtaatcatgagtaagccaccttttaattgtaaaatctggtcaatgatgttagctaaaatgataatacagaatatcaataattttttagcaaaacctttcattgattttttagaccatagattattatttttaattgctttagcaaaaccagtaacaacatctataatcatcaaaacaaataaaaaatatagtaactttaaatcacctgcatatatgaacatatgaaatgcttctgtgtccgtaaatcttaattttacctcattcattttatacaccttctctaaatttattatttaacgggttctgtaacattggattacctgaaccgtcattatgccaaaatctcacaccagattctaaaattgcttttaattgttccattaacatggggtcaatgtcacgtatggtatacgtacctgtacattttaaatagttgcaaacagtcatactgttaattggttcaataaatgaattatagtcattcacttcaaaaccaaacaacatataatatttttgtaaaaatgtaatttctttaggtgacggtacactaattttcatcgttaaaccgttaatactgtttgcaatttggaatgcgttgcccatttccgactctgtcactgacggtggttgtaatgctaaatctttatattctgcttgttgttgtttgtagaaattatattcttcattaaacttaccaaataaagcagtcggacttaaattacttgctacacttacagcgtcataaaaacgtgattttgggtcactaccatttaatacattatctatacgacttgtgattaattgactttctgcattacgctgtctattggcttgttgtgattgtcctaaaattccgttattaattaatataggcacttgcgcaaaactattaaatgttatattggtatttaagaatgaacctgtatcaattaatatatctttatttttagcaagtatcggtctatcgttttcagcactgttataatcaactggatatactcgcacttcattatgataaccaatgatggattttgtacgtaacttaacacctgttttttgtgaaattttaccagcgtcaagtaacattgtgttaccgttccagtcataaaattcaatcgtcatgtactcattacgtatcatatgtttaaactcgtcttttttagacaacatcatctcttgaagctttgtgaaacttaatgataaatcgtttaaactccattcttttgattttccaccctgttttaatgtctttaatccagtaattttttcacttgtcttaacgtcctctaaatcttttgtattaataaaatctttaggtaacatttgaaccttttgaaagttttgtgtaatccatggatatgcactcattttatccataaagttaataaagtcaccatattccataacgtataagttgactggcgatgtgatattgtcatatatcgtacctttagacgtatctaagtttggctcttttttcgtaccaaatttctttgataaatcagcgcttgactggaataacactaaattttccaaatactgttgcatttggttatacacatagtttttatttgatacttttaacacatcatcattgttacgtaacatcggcaacatatagttatacgtacgctttgataagtgttgacgttcaatattaacgtttgaaagttgttctaatacattaccttgtgtatacgtcataatagtatcaatcacaaaatatatttttaccacaacatcattcacatattcgatttgattcacaaaagcgtaatagcgtctgtcctcaaaatctgataaaaacgtcatgtagttaatcccttgtgcgtcatgccactgcatatcaacattgatttccattctatcacgtataaaattatacggttgtttggaatagtctaatgatttaaaatgacgaccgtttaaaaaataatcatcacgctctttattactattaaaatgaattgtattttgatagtctgtaaacggtgtgttatagaaaaatttaaaatttgttaattttctcatttttacctccataaaaaatagtcgtataaataatttatacgactattataacatttttattcaatgatttgtgtatctattgcaaaacgtttatctccatttgttaagtcactatcgctataatttgatgtaacaaaatgtaattcattattaaagtttaaatataatcttgtattaatcattttcgaatcaatcgcactttgtgtgtagtgatgtgttgattttaagttagcgttaatcgtacctaatttaatatcaccgtttttcttaatcccttttaataccccttttaattgtatggttttaacaccattaattgttacaatacgatattgcggtgcgggataaccaccgttgctatcacttgcaactataccactttctagcaatatatcttgccaacctgtatcattaaattgtaattttgcactgttgattttttgatcaaaattttgttcaatttctgatttagattgtgcaattttagtatctatatttaagttgtccactcttgttgataaagtgttaatacttgattcatttgttgatgttttttgttttaaatcattaatatcattatcatattttgataaatcaatatgtccgtttccgtcaacaactggtctatcttttaattcttgaatatctttttcaatttttgatattttatcattatttgtttttaaagcagcgatgtcagatttaattgaattaatatcctgtgtataatctttttggttaatactgtttaattttgtttctaactcttttatcttatcaaggttggcatttgctttgatgtcattaatggtttgttctaaactttcaagtttcccagcacttgaattttgttttaacttattaatatcctcttgtatttcttgaattgtgttgtcattgttttgtttagattttaataattcaatctgttgttcaatatcttttattttatcaagattgatactttttttaacttcagctaattctctttttaacgcgtcaatgttttctgcaccagtattagctttaattaaattaatttcatttgtgtttcgtcctacactatctttagtagcgtttaacgattgtgtaagtgtttcatatttatcatcatactgtaacattgatttttcaaattcatttaattgtgtttgatgttgttctaaactttcatttaatatgacatctttttcttttaatgaatcaatctcttttttattactatcaatcattggttggaatttttttattttctctagaaatgttgatattttctctttattatcattaattgcaatatcatgattttctatttgaccactgtatttattaatcaatgtttttaaatcattataaaatgttaatttataataaccagtatcagtacggacataaatatgtccgtctgatgtactgattaagtcattttcttctgttaaaaaatctgctaacctgtctattgtttcaacttgtcttaaacttcttacgattctatcagccattgttcacacctcttatttgtatcgtttccaactaaactcaaagaaaaaacctaaaatacccattatgagaacaccccccaaggaataccaacactgtaactattacctgttttaccgttccattgtctcactggtaaataataacgtgtaccttcccaattgtaaccaatccatacatacccgtctgataaacaaacttcgtcatatggtgtatagccgtttggttggaaccaatagccattaagctcagataatttcggactaccgacacgagcaaatattggtaaaaaaccacatgtaaatgtagcattttcatttctgtaatatgtgccgtattggttttgtttccagttgttagtttgttgaatatttttttctaatactttactatcactatttgaaaattttggacgaataaaatgcgtaacaccgtcataataatgtgttcttattgttgctttttcccaaccatcatatccaccatttaaccagttttgttctaagcatgtataataatcaagatttccacttgttacacattgaatatgcccatattgagaattagtgtatacagcaacgtcacataattgaggtttaaagctaggtgtattttcatacaccgctgctaaacctttaaagtcgttgttaatggcgtctttggcattaccccacatgcgaactttaccgtcagtaatgtaataaacataagcaactgctaagtccatacattgaaaaccatatactccatcaaagtcaactccaacaccctcatgcttatatatccattcttttgcttgttgttgtgatttcatgaaacattatcctttcttgacccaactatattgacgtttttttgtatctgcattaacgttactaaagaattctttatgttcggacacattagcctctaatgtttgtcttacttcaccgacagcgttaccacttgaaacacgtaaccatgcacccacttttttaatttcttctggtgcgtctctaaacaattccatttggttaccagtaatataatattcaccaggtgtcgtaacgtaagctatccagttattgtattgacttgcttctaaatactcttgatatggtgcgtctgttttgattgttgtccataaaccataatcccattttaatgtaaatacatcgagcgtcataccacgcatgattttaaccatttttcgaccagtagaaaaacgcgttaattcttgtactgtacctaatgtttgtgttgtagggtatacattgatgaaacaaccagcgtctataatttttttactaccattcattggcatatttttaagtttactagctgtaccaccgtcaatataatagaaccctgcttgtgttaagtcatttaagtcgtcaatatggtctggaattgataacgcacgtccatcgtcttttgttaatttatagttttgtgaacctctcgcacgtaatgcttcaaagtgttcatactcaccaagttgaaagaacccatataaattattgaatcgttttccaccaccgccattagtcatagcaagtaataacgatttacgttttgtttttggattggtataaatacaaataccctccggctctttaaagttatcacgtggaaaattaataccgtcttgatatgataatttaaacggataatcataaatcttttgaccagttgttaatgaatatttaccaatttgaacgtgtgaattaactgaactgttaccacttaaccagtataaatcatcaccatcaacggcaatcccttgcatccatcgattatcattgttttctgaattatcaatcgtcatttctttttctacattatcaatgtgattttttacgtcagctcttgaacgtacctgtattgtcccgtcaccgaatcttaaaacgattttgtcattttcttcatcaattaacggtgtaaacgtgtgtttgtttaaaagtgactgtggtgtataatctgttaaccctttagcctcttctaaatctaaaatataattatctttatatgcgacttgtaacagttttgctacaccgtcatgatgtaaccatattttcatttcaccgttagattgtctttctaaacctattgtagtaccgtgaccaccttgtacaatacgcatactagaaattaagtcaccgctaggcgttaatttattaatccaaaaaccttctgggttttgtgaatctgattgtgtagagtacatttgattcgtttctttatctatgtttatagattggttaacagcattacgaataccaccgaatcccataacaaactttggttcaagctcatttaattcaaaaccattaacaaaacggtcaatgtctttaattaagtctttaacttctgctttaaaatcattcatttgtttcatttctgcaactttaaataatgcaaatgcagatgtaagaccagtactatatttagtaaattcatcatgaataattttatctattgtaccgtcgtttaaccaacctctaaataagtctttcgcttggtctgggaatgctttcattaaatcgtcccagtttctaaaacgtttttttaactcaccgtcatagtcccaaatacgatgtgctaatacttcaatgagctttgataatcttgaaatataatcataatatgattttgaattggtattataatctgctctatcatcgtaaaacggtgtgtaacgttctctcgttttatatatttcgtctaaaaatggacgaatgtcgtcaaaatatttaaaatcgttttcattatatgccataattttccacctttaccaaatttgtaaaaaacattttttatcaaattcatttaaaattttctttcttaaatcgtatactttatcaatattatcaattaaatactgttttgaaaattgtgtacctttcgcattacctttttgattttgattacgttttgcgttttgattactttcgttacttgatttattcacagttttaccgttgtcaattgtattattatctgcaaatcgtaacgttgtgttatctacatctatgttaacctcgctttgtggtaatgacacataagcatttctgtttgctgtcatgccagttgaattgtctaaagatgttgcattttgatttgaagtttcatcagtgttgcttattgtatcttcgttgtgttctgtgaagccttgtgattgaagatatttttctacttcacttgatgaataaaccacattcaaataatcctcatgtgtgatacatacagtaatcacttgcatgccaaaagcttcaactgtttgtctgttgatttctctatctaaaaagtgtattgtaaatgattttttaaaaagtaagtcagataagtcatctttaagtttaaaacctttaaacactttttcattaacgatggctaaaacgtctttgtcaaacttcaacattttttgcatgaattgaaattcatcatcataaaacgttaatttatcattatttacaaattcattaaaaccttttttaattaattctgatttaataaaatcaaataaagtcattgtatatctagccattgtattcactactttcatcattagacaatgtatctatcattgtgatttctgatgtaacttcatcgtcgtaatacggtttaatatctaaaccatatcgttttgataagaatgtaataggttcacgaccttttaaataaatattactatttgatgtggtaaaacctcggttgctttttgcctcttcgtcagaaacaccgctttccttatccactgctagtgaattaatacctaaatagttacttaattcactaattttattttggtattcacgtttcatctcagttagtgctggaatcacactattactggttaaatctatgatatcatcatcggcgttaaacataggtgacattttaacaaatggtgcaccgttgtatatttccgatacaagttgattaactgactcatcattaatgtctgatttaaatattttgctaaattttgcttgcataattaatgagaatctagataaaacaacctcagataattcatcagtataatgttctataatttctatatcactattatattgaattggtttattttgcattacaacaaaattaccactcatacagttatcatatattttatgaatctgtaagcattcatctggtattaaatagtctggaacaatgaaataaatatcatcttttgttaatcgtttttgaaattgaaaattgaaatttgatgaaaagtttggggcttgattaaaataagtgttgttaacatagcccaaaatcataatttgttcatttcttgctttaccaacaacaacattaatgttttgccttaatgcagattctaattgaataaaatctataccaaccgtatcacgattggtatagtttattaataggggtaaaaattccaaataacgattaaacataagacgtttaaatctgttgcgatgttctacaacacgtttattgatttctttagataattcaacctgtacgcctttattatgtttagtcatttatatcacctctattattctgttctcggtgttacatcttggtcagtaattaaaattttgttaaagaatgggctaatggctttaaatgaatagtaatgaatccagtgtgtaacttcatcaaattcaccattatagaatggttgttttaacattccttttgtgtaacgtttatatttaattgaattaatatccaaaataaaagcgtataaatctgattttggtttaatttcttcaacgttagacttaaattcagataaatttgaaacatcataagtgaatactgaaccaactggaattgtatcacctttatgagtttgataatcaccgtaagcacgtaagaaattaactgattcgtcacttgatacgacaatatctttagtaactttaaaaactccacctaaatcatcaaaactaataacgtggtctgtaaagtcaatccctgctacttggaacgtgttcgcaatctttgtatctaaaagataagattttaagctatcagtcgttaatataacaatatcttttaattttgaaactgttgtatattgtccaatagcgccacctgaagcacgatgaacttcattatatttagcactgttgttttgtaagttaagaatagcttcaaaaactttacttgctaaatcttcttttgatgttgctttacgtacatttgattcagataattgattcaatgaataatcaactaacattgcacgcatttctttttcttctaatacgttaatatcagaaattttctttttatagacacctaatgcataattagttgcgtctgctaatgtttggaaattaaagcgtgtatcattgttatttaatgtgaatttttgtttcttcacaataccactaccatataacttagtagccatacgtggataattacgttttaacattaattcttcatttttagataaatccatgttaataggtactgtgtccataattacatattcttcactgtattgaccaataaagtcctgctctttagctaaccaattaaaacgattacctaatgcaatatcgattaataacgtttcattaatcttagggaataaaaatttatttacaaatgtttcaaacattgtattagaattatcccacttatcgccaaacgtccatgattttgaataagtatgattaaagtcttgtaatgcagatttagctgactgtgcaactaatagtgctgtttcgttttttgtactcttttctgccatgatttattattcctcctctacatcgccagtgaatgactgttttgaaagtgaatgaatttgtacaccataactatcttcacttttgtttgtatcaattgacatattttcatttaattctgttcgtttatttaatcttgaatcttcatatgatgtgcccatcatagaacgcatattgttaccctcatacatgtttaaattcctcctaatctaaatctaacttatccactaattcttcatctgaataatctttgtcgttgtcatctgcttcagtaacatctggttgtggttgtggttgtggttgtggttgttgcatttgtgatgtttcaaaattagtaaatcgttgttctaatgaagcgatacgttgttctaaaacaacagggtctaattttgcactatcttcatcagtaatagtaggttctaatttgttttcattttcttcttcaattgtttctactgattcactttcagacgattcttcagtttcttctgttgattcttcagttgattcttcagttgattctgaagaatcttctttctcgtcaggttttataatttcttcaaattcagtcattaatacacacctccaaatattttatatcttattatatcatagaatatttaaataagtaaattaaaattattttaagttcaaatcataaattttgataaaagtcaatagatacataaattttgtatttgatgaatatgttataggttagataagttggaaaagtagacgtacagtttttataagtttagtaaagaaatgataagtgaatttataagttttgatttgtataatcgtttattttaaacggtggggagg

SEQ ID NO: 132 - DNA, 18030 bp, Rosenblumvirus sp.
  source 1..18030: mol_type = genomic DNA
aattacacctccccaccgtttaaaataaacgattatacaaatcaaaacttataaattcacttatcatttctttactaaacttataaaaactgtacgtctacttttccaacttatctaacctataacatattcatcaaatacaaaatttatgtatctattgacttttatcaaaatttatgatttgaacttaaaataattttaatttacttatttaaatattctatgatataataagatataaaatatttggaggtgtgtattaatgactgaatttgaagaaattataaaacctgacgagaaagaagattcttcagaatcaactgaagaatcaactgaagaatcaacagaagaaactgaagaatcgtctgaaagtgaatcagtagaaacaattgaagaagaaaatgaaaacaaattagaacctactattactgatgaagatagtgcaaaattagaccctgttgttttagaacaacgtatcgcttcattagaacaacgatttactaattttgaaacatcacaaatgcaacaaccacaaccacaaccacaaccacaaccagatgttactgaagcagatgacaacgacaaagattattcagatgaagaattagtggataagttagatttagattaggaggaatttaaacatgtatgagggtaacaatatgcgttctatgatgggcacatcatatgaagattcaagattaaataaacgaacagaattaaatgaaaatatgtcaattgatacaaacaaaagtgaagatagttatggtgtacaaattcattcactttcaaaacagtcattcactggcgatgtagaggaggaataataaatcatggcagaaaagagtacaaaaaacgaaacagcactattagttgcacagtcagctaaatctgcattacaagactttaatcatacttattcaaaatcatggacgtttggcgataagtgggataattctaatacaatgtttgaaacatttgtaaataaatttttattccctaagattaatgaaacgttattaatcgatattgcattaggtaatcgttttaattggttagctaaagagcaggactttattggtcaatacagtgaagaatatgtaattatggacacagtacctattaacatggatttatctaaaaatgaagaattaatgttaaaacgtaattatccacgtatggctactaagttatatggtagtggtattgtgaagaaacaaaaattcacattaaataacaatgatacacgctttaatttccaaacattagcagacgcaactaattatgcattaggtgtctataaaaagaaaatttctgatattaacgtattagaagaaaaagaaatgcgtgcaatgttagttgattattcattgaatcaattatctgaatcaaatgtacgtaaagcaacatcaaaagaagatttagcaagtaaagtttttgaagctattcttaacttacaaaacaacagtgctaaatataatgaagttcatcgtgcttcaggtggcgctattggacaatatacaacagtttcaaaattaaaagatattgttatattaacgactgatagcttaaaatcttatcttttagatacaaagattgcgaacacgttccaagtagcagggattgactttacagaccacgttattagttttgatgatttaggtggagtttttaaagttactaaagatattgtcgtatcaagtgacgaatcagttaatttcttacgtgcttacggtgattatcaaactcataaaggtgatacaattccagttggttcagtattcacttatgatgtttcaaatttatctgaatttaagtctaacgttgaagaaattaaaccaaaatcagatttatacgcttttattttggatattaattcaattaaatataaacgttacacaaaaggaatgttaaaacaaccattctataatggtgaatttgatgaagttacacactggattcattactattcatttaaagccattagcccattctttaacaaaattttaattactgaccaagatgtaacaccgagaacagaataatagaggtgatataaatgactaaacataataaaggcgtacaggttgaattatctaaagaaatcaataaacgtgttgtagaacatcgcaacagatttaaacgtcttatgtttaatcgttatttggaatttttacccctattaataaactataccaatcgtgatacggttggtatagattttattcaattagaatctgcattaaggcaaaacattaatgttgttgttggtaaagcaagaaatgaacaaattatgattttgggctatgttaacaacacttattttaatcaagccccaaacttttcatcaaatttcaattttcaatttcaaaaacgattaacaaaagatgatatttatttcattgttccagactatttaataccagatgaatgcttacagattcataaaatatatgataactgtatgagtggtaattttgttgtaatgcaaaataaaccaattcaatataatagtgatatagaaattatagaacattatactgatgaattatctgaggttgttttatctagattctcattaattatgcaagcaaaatttagcaaaatatttaaatcagacattaatgatgagtcagttaatcaacttgtatcggaaatatacaacggtgcaccatttgttaaaatgtcacctatgtttaacgccgatgatgatatcatagatttaaccagtaatagtgtgattccagcactaactgagatgaaacgtgaataccaaaataaaattagtgaattaagtaactatttaggtattaattcactagcagtggataaggaaagcggtgtttctgacgaagaggcaaaaagcaaccgaggttttaccacatcaaatagtaatatttatttaaaaggtcgtgaacctattacattcttatcaaaacgatatggtttagatattaaaccgtattacgacgatgaagttacatcagaaatcacaatgatagatacattgtctaatgatgaaagtagtgaatacaatggctagatatacaatgactttatttgattttattaaatcagaattaattaaaaaaggttttaatgaatttgtaaataatgataaattaacgttttatgatgatgaatttcaattcatgcaaaaaatgttgaagtttgacaaagacgttttagccatcgttaatgaaaaagtgtttaaaggttttaaacttaaagatgacttatctgacttactttttaaaaaatcatttacaatacactttttagatagagaaatcaacagacaaacagttgaagcttttggcatgcaagtgattactgtatgtatcacacatgaggattatttgaatgtggtttattcatcaagtgaagtagaaaaatatcttcaatcacaaggcttcacagaacacaacgaagatacaataagcaacactgatgaaacttcaaatcaaaatgcaacatctttagacaattcaactggcatgacagcaaacagaaatgcttatgtgtcattaccacaaagcgaggttaacatagatgtagataacacaacgttacgatttgcagataataatacaattgacaacggtaaaactgtgaataaatcaagtaacgaaagtaatcaaaacgcaaaacgtaatcaaaatcaaaaaggtaatgcgaaaggtacacaattttcaaaacagtatttaattgataatattgataaagtatacgatttaagaaagaaaattttaaatgaatttgataaaaaatgttttttacaaatttggtaaaggtggaaaattatggcatataatgaaaacgattttaaatattttgacgacattcgtccatttttagacgaaatatataaaacgagagaacgttacacaccgttttacgatgatagagcagattataataccaattcaaaatcatattatgattatatttcaagattatcaaagctcattgaagtattagcacatcgtatttgggactatgacggtgagttaaaaaaacgttttagaaactgggacgatttaatgaaagcattcccagaccaagcgaaagacttatttagaggttggttaaacgacggtacaatagataaaattattcatgatgaatttactaaatatagtactggtcttacatctgcatttgcattatttaaagttgcagaaatgaaacaaatgaatgattttaaagcagaagttaaagacttaattaaagacattgaccgttttgttaatggttttgaattaaatgagcttgaaccaaagtttgttatgggattcggtggtattcgtaatgctgttaaccaatctataaacatagataaagaaacgaatcaaatgtactctacacaatcagattcacaaaacccagaaggtttttggattaataaattaacgcctagcggtgacttaatttctagtatgcgtattgtacaaggtggtcacggtactacaataggtttagaaagacaatctaacggtgaaatgaaaatatggttacatcatgacggtgtagcaaaactgttacaagtcgcatataaagataattatattttagatttagaagaggctaaagggttaacagattatacaccacagtcacttttaaacaaacacacgtttacaccgttaattgatgaagaaaatgacaaaatcgttttaagattcggtgacgggacaatacaggtacgttcaagagctgacgtaaaaaatcacattgataatgtagaaaaagaaatgacgattgataattcagaaaacaatgataatcgatggatgcaagggattgccgttgatggtgatgatttatactggttaagtggtaacagttcagttaattcacacgttcaaattggtaaatattcattaacaactggtcaaaagatttatgattatccgtttaaattatcatatcaagacggtattaattttccacgtgataactttaaagagccggagggtatttgtatttataccaatccaaaaacaaaacgtaaatcgttattacttgctatgactaatggcggtggtggaaaacgattcaataatttatatgggttctttcaacttggtgagtatgaacactttgaagcattacgtgcgagaggttcacaaaactataaattaacaaaagacgatggacgtgcgttatcaattccagaccatattgacgacttaaatgacttaacacaagcagggttctattatattgacggtggtacagctagtaaacttaaaaatatgccaatgaatggtagtaaaaaaattatagacgctggttgtttcatcaatgtataccctacaacacaaacattaggtacagtacaagaattaacgcgtttttctactggtcgaaaaatggttaaaatcatgcgtggtatgacgctcgatgtatttacattaaaatgggattatggtttatggacaacaatcaaaacagacgcaccatatcaagagtatttagaagcaagtcaatacaataactggatagcttacgttacgacacctggtgaatattatattactggtaaccaaatggaattgtttagagacgcaccagaagaaattaaaaaagtgggtgcatggttacgtgtttcaagtggtaacgctgtcggtgaagtaagacaaacattagaggctaatgtgtccgaacataaagaattctttagtaacgttaatgcagatacaaaaaaacgtcaatatagttgggtcaagaaaggataatgtttcatgaaatcacaacaacaagcaaaagaatggatatataagcatgagggtgttggagttgactttgatggagtatatggttttcaatgtatggacttagcagttgcttatgtttattacattactgacggtaaagttcgcatgtggggtaatgccaaagacgccattaacaacgactttaaaggtttagcagcggtgtatgaaaatacacctagctttaaacctcaattatgtgacgttgctgtatacactaattctcaatatgggcatattcaatgtgtaacaagtggaaatcttgattattatacatgcttagaacaaaactggttaaatggtggatatgatggttgggaaaaagcaacaataagaacacattattatgacggtgttacgcattttattcgtccaaaattttcaaatagtgatagtaaagtattagaaaaaaatattcaacaaactaacaactggaaacaaaaccaatacggcacatattacagaaatgaaaatgctacatttacatgtggttttttaccaatatttgctcgtgtcggtagtccgaaattatctgagcttaatggctattggttccaaccaaacggctatacaccatatgacgaagtttgtttatcagacgggtatgtatggattggttacaattgggaaggtacacgttattatttaccagtgagacaatggaacggtaaaacaggtaatagttacagtgttggtattccttggggggtgttctcataatgggtattttaggttttttctttgagtttagttggaaacgatacaaataagaggtgtgaacaatggctgatagaatcgtaagaagtttaagacaagttgaaacaatagacaggttagcagattttttaacagaagaaaatgacttaatcagtacatcagacggacatatttatgtccgtactgatactggttattataaattaacattttataatgatttaaaaacattgattaataaatacagtggtcaaatagaaaatcatgatattgcaattaatgataataaagagaaaatatcaacatttctagagaaaataaaaaaattccaaccaatgattgatagtaataaaaaagagattgattcattaaaagaaaaagatgtcatattaaatgaaagtttagaacaacatcaaacacaattaaatgaatttgaaaaatcaatgttacagtatgatgataaatatgaaacacttacacaatcgttaaacgctactaaagatagtgtaggacgaaacacaaatgaaattaatttaattaaagctaatactggtgcagaaaacattgacgcgttaaaaagagaattagctgaagttaaaaaaagtatcaatcttgataaaataaaagatattgaacaacagattgaattattaaaatctaaacaaaacaatgacaacacaattcaagaaatacaagaggatattaataagttaaaacaaaattcaagtgctgggaaacttgaaagtttagaacaaaccattaatgacatcaaagcaaatgccaaccttgataagataaaagagttagaaacaaaattaaacagtattaaccaaaaagattatacacaggatattaattcaattaaatctgacatcgctgctttaaaaacaaataatgataaaatatcaaaaattgaaaaagatattcaagaattaaaagatagaccagttgttgacggaaacggacatattgatttatcaaaatatgataatgatattaatgatttaaaacaaaaaacatcaacaaatgaatcaagtattaacactttatcaacaagagtggacaacttaaatatagatactaaaattgcacaatctaaatcagaaattgaacaaaattttgatcaaaaaatcaacagtgcaaaattacaatttaatgatacaggttggcaagatatattgctagaaagtggtatagttgcaagtgatagcaacggtggttatcccgcaccgcaatatcgtattgtaacaattaatggtgttaaaaccatacaattaaaaggggtattaaaagggattaagaaaaacggtgatattaaattaggtacgattaacgctaacttaaaatcaacacatcactacacacaaagtgcgattgattcgaaaatgattaatacaagattatatttaaactttaataatgaattacattttgttacatcaaattatagcgatagtgacttaacaaatggagataaacgttttgcaatagatacacaaatcattgaataaaaatgttataatagtcgtataaattatttatacgactattttttatggaggtaaaaatgagaaaattaacaaattttaaatttttctataacacaccgtttacagactatcaaaatacaattcattttaatagtaataaagagcgtgatgattattttttaaacggtcgtcattttaaatcattagactattccaaacaaccgtataattttatacgtgatagaatggaaatcaatgttgatatgcagtggcatgacgcacaagggattaactacatgacgtttttatcagattttgaggacagacgctattacgcttttgtgaatcaaatcgaatatgtgaatgatgttgtggtaaaaatatattttgtgattgatactattatgacgtatacacaaggtaatgtattagaacaactttcaaacgttaatattgaacgtcaacacttatcaaagcgtacgtataactatatgttgccgatgttacgtaacaatgatgatgtgttaaaagtatcaaataaaaactatgtgtataaccaaatgcaacagtatttggaaaatttagtgttattccagtcaagcgctgatttatcaaagaaatttggtacgaaaaaagagccaaacttagatacgtctaaaggtacgatatatgacaatatcacatcgccagtcaacttatacgttatggaatatggtgactttattaactttatggataaaatgagtgcatatccatggattacacaaaactttcaaaaggttcaaatgttacctaaagattttattaatacaaaagatttagaggacgttaagacaagtgaaaaaattactggattaaagacattaaaacagggtggaaaatcaaaagaatggagtttaaacgatttatcattaagtttcacaaagcttcaagagatgatgttgtctaaaaaagacgagtttaaacatatgatacgtaatgagtacatgacgattgaattttatgactggaacggtaacacaatgttacttgacgctggtaaaatttcacaaaaaacaggtgttaagttacgtacaaaatccatcattggttatcataatgaagtgcgagtatatccagttgattataacagtgctgaaaacgatagaccgatacttgctaaaaataaagatatattaattgatacaggttcattcttaaataccaatataacatttaatagttttgcgcaagtgcctatattaattaataacggaattttaggacaatcacaacaagccaatagacagcgtaatgcagaaagtcaattaatcacaagtcgtatagataatgtattaaatggtagtgacccaaaatcacgtttttatgacgctgtaagtgtagcaagtaatttaagtccgactgctttatttggtaagtttaatgaagaatataatttctacaaacaacaacaagcagaatataaagatttagcattacaaccaccgtcagtgacagagtcggaaatgggcaacgcattccaaattgcaaacagtattaacggtttaacgatgaaaattagtgtaccgtcacctaaagaaattacatttttacaaaaatattatatgttgtttggttttgaagtgaatgactataattcatttattgaaccaattaacagtatgactgtttgcaactatttaaaatgtacaggtacgtataccatacgtgacattgaccccatgttaatggaacaattaaaagcaattttagaatctggtgtgagattttggcataatgacggttcaggtaatccaatgttacagaacccgttaaataataaatttagagaaggtgtataaaatgaatgaggtaaaattaagatttacggacacagaagcatttcatatgttcatatatgcaggtgatttaaagttactatattttttatttgttttgatgattatagatgttgttactggttttgctaaagcaattaaaaataataatctatggtctaaaaaatcaatgaaaggttttgctaaaaaattattgatattctgtattatcattttagctaacatcattgaccagattttacaattaaaaggtggcttactcatgattacgattttctattatatcgctaatgagggcttatctatcgtagaaaattgtgcagaaatggacgtattagtaccagaacaaattaaagataaattaagagtaattaaaaacgattctgaaaagggtgataataatgaacgaccaagagaagatagataaatttacgcattcgtatattaatgatgatttcggtttaacgatagaccagttagtccctaaagtaaaagggtatggacgctttaatgtatggctaggtggtaatgaaagtaaaatcagacaagtattaaaagcagtaaaagagataggtgtgtcacctactctttttgctgtatatgaaaaaaatgaagggtatagcgcgggtttaggttggttgaaccatacatctgcacgaggtgactatttaacagacgctaaattcattgcaagaaaattagtatcacaatcaaaacaagcaggacaaccgtcttggtatgattacggtaatccagtgcattttgtaccgcaagacgtacaaagaaaaggtaatgcagattttgctaaaaatatgaaagcaggtacaatcggacgtgcgtatattccattaacagcagcggctacttgggcggcatattatcccctaggtttgaaagcgtcatataataaagtacaaaactatggtaatccttttttagacggtgcgaatactattcttgcgtggggtggtaaattagacggtaaaggtggttcacctagtgattcgtctgacagtggtagtagtggtgacagtggtagttcactgctcgctttagcaaaacaagccatgcaagaattattaaaaaaagtacaagacgcattacaatgggatgtacacagtataggtagcgacaaattttttagtaatgattattttacattacaaaaaacatttaacaacacatatcatattaaaatgacgattgggctactcgattcattaaaaaaactgattgatagcgtgcaagtagatagtgggggtagtagttcaaaccctactgatgatgacggagaccataaaccaattagtggtaaatcagtcaaacctaatggtaaaagtggtcgcgtcattggtggtaactggacatacgcacagttaccagaaaaatataaaaaagcaattggtgtacctttattcaaaaaagaatatttatacaaaccaggtaacatatttcctcaaacgggtaatgcaggtcagtgtacagaattaacatgggcgtatatgtcacaattacatggtaaaagacaaccgacagacgacggtcaagtgacaaacggtcaacgtgtatggtacgtctataaaaagttaggtgcaaaaacaacacacaaccctactgttggttatggtttttcaagtaaaccaccatacttacaagcaacagcatatggcattggtcacacaggtgtcgttgtagcagtatttgacgatggttcattcttagtagcaaactataacgtaccaccatacgtcgcaccgtcacgggttgtattatatacattgattaatggtgtacctcataacgctggtgataatattgtattcttcagtggtattgcttaattaactatgctataatgaacacatgctagtaatgctagtaaataaaatacaaaacataatcaattttcgtacacatttttcatgttatctcaaaagaaaaaggcaactgttatttaacagttgcctttttttaattcatcatgttcgcgttttaatatatgcaaatcagatttgttatgaactgaacgttcaacaggaaataagtcgttaagtgaaaacgaaccaatgtcactttcaatataaagaatatcatcaaattgactatggtcaaaattttctctagcgtcttttaatataaattcacgtttcatattaagttcatcagaaaaatattcatcatatacattaccacatacaatttctgttttagacggataaatcgatattgtaccctgttcattatagatacttttattgttttctataatcgcaccgtcaaagaattgttcacgtacaaaggtttcaaaatcgacgcttgtatcaaaggcgcttttaggtataccagcagaagcaattttaatctttccattcacttcatatgcatattttttatgattcagtacaaacatcttatctatctgttcgttttcaatatcccatttacctaaggctatcgggtcgaataaactggggttcaataagggtttaacaacggatttcatatacaaactatcagtatcacaataaataaaattgtcgtcaatttcactttccgttaagtattggaatggtactaataagttatacaatgaacgtgatgttacaaatgtagaaaataaaatattacgttctgtgtttttgtaaccgttaataatattgtatagttcattgttatcatctaaacggaataagttaaaatgtgaacgtaatgcaggtatgccatataatccgttaagtacaactttagacaacataacctcctcatttgagtaagggtgttcgttgatgtcatcagtaatatgatagtcgtaaggtgatgtcatgttgattttgttttttaacttaccttgtgttttaataaaatagttttgaaatataatatcacgtgcatgaaagtattcacattcatatatcacaaacgaattaacacgtatatgcgtgcaatcaatacccgtaatgtcttgaattattcttaatgtatttgtattaatattaacgtaatcattatcattattatagtattttacaatcatttgacgtaatacacgtgatttgattttaattaataaatcattgttaaatacatctttatcaatcttatataatgaaaaataattgtcatcatctaaaaaagtagggattaatgtaggttctgaataatgttcataaaagtataaccatgtcggaattttctcatgatacatcacataaggataactggaattgatatcaatagaaaaacaaggctcatcaataagtttgtttatgtatttagtgttatacatatttaaaccaccacgataaaatgatttgatatagtcataaaaattcatatcatggaaatggtaatgtgtatatgatattttaatatcttgatattgattgagtaactgaaaacgcgtcatttgattatttaaatacgattccataatattcaatgaaaatgttaatttgttatagtcaaaatttggaaatatatcactataatgaatatggcacatacctaatataatcacgtcattatgaatgtatgtaagttgttcaggtgtgagtttagcaaaacacttaacagcatagtcataggcttcactatctgacatatcgttatctttatcaaatatcgtgtaattaaaatctgttttaagttggtcgtctgttaaataaccaccgtcaagcaactttttacctaatgttgcaattgatgtattggttttcataaagttatcaataatattaaatttaaatccatttaaaaacattgttaagtctaaattaatagacgatttcacacgtttttctaaaatcacattttgatttttagctaaaatagtagcctcttgcatctttagtgtgtgttcgttttcttctgcagattttaaatatatattttcgcgtgtgatattatcaaaataacgcatggtatctttaagtaaaaaatggttgtcatacttattacagttatgtgcaatcatgataatatctgtttttgacttagtgattgtatcacgtcgtttcacatacgtataaaatgcgtcataaaacgattcaaaactaggaaatacttctacatcaatctcataaccattaaaccaaccaattgctactgaatacgttacgtttttatatttggttggtttttttcgtccgttaactttattgtacgctaatgtttctatatcccagtataaaatcattcgacgttcatgtttatgatattgcatgcattctagtaatcccataatcttacacaccttttataagccgtattgtttcattaaatacttctttgtattttcaatatagttatcttcatatattttttcttttctttcaaattcactcatatttttcttcatttcattttttatatgaaattttataattttattcatatctaaatataaatatctatcattatcaacaacgtaattttttgagtaagcgttatcaaaatgtaaattgcttggattgtaataataacgctccatgttttctttataaaacatatcttctcttaaataaataacattgtcatctatatctttgattttagtacaaaattcatattgttttgtataaggtataacaataatattagcattaaatgtatcaacattatacataatttttatatatttatcgtcagttttaatatagaaaaaatcaccgttttgattgatatgatttcttaaattatcatctgccaaattatattcgttaaattcaaactcgccagtagtcatagcgtcatcgtttgaattgaatgcccgtgtgttacgcttttcatttacgtaatcgtttcttcgcatttctaaaaaaatatttttgtaaagtcgtgatgtgttcattttatgtttttgtaataagttatatatatttaaattggataatataggacttgaaaagttgacagcattacctagtaaaaacattttagggaagccgatataatcaacattaccatggttacggtcgattgattcataaattgtttttaacttatcccactcgtcaattaaatagtcatcttcaagtgctaaaaattcatcatatataatgatagggtagtgttttaaaaagttagaatgatattttaaatcagttgcactattcaaatctgtaatcacaccgatttccttatcttgatagatgatagctaaatagtccctagcgcttctgaatgtgacacgcttagatttgaatagtgggtttttgtctatgatttcctcaataaaatcacgataagcgtcacgtaatgtataatgacgtgataataaagtaaatttaatatcaagttttatagctaaataaataaagaatgaaacatagttgaacgattttccgtcagaacggtttgaaatagatatgtaatagtctatatcatcattcatgagttcatcaactaattctatttgattatagttatctggtattttttttctgacatgattgacagcattttgataatctcttaccatgtctaaacgattttgtttcaccatgtatttgctccttataatagtttatgatgtcgtttacagtattaaaattagtcttcaaatgttgcataatataaaaagttatacctcacatcttcatcatcaatagtagtcactggtctgtctgatttaccaatttctttgtataaagtgtcaatttctttaatatatttatacatagaagaattattatttttagcttgtaattcatataaagcatatttatgttttttagcgtttttattattagattcatctttacggttatatatttcaagtatatagtttaattgttcatgtcttttacctcttaccaatgatacagcatttacatatgacacgtttctttcttttggaaaatagggcaaatgtgcgaaatgtttccatgcgtctatgtacgcctcttgtaaatctttatcatcaaatttaaaattaacagtactaaaatcatttaaaaacaattctttttcctgctcttttcttgcgtctctttcttttttccatttatccatttcggacgtatgtctaaccattgctaacgacctccatataacccatatataaccactaaaaagataatgtagaatataatcaatgtagtaaataaaacaccaaatgacacacgtatatgcattgtcataagtattacaagtgtaattaaaaatgctaaaaggaaaacaatagctatgtttaatatattagtcatgttctatcacgttcccgttattatatatcactttgttttgaaaaattattgttatattactttctattggtttctcgaaatattctaatacgtcatcaatagtacaatccataaaaacttcttttttatataatgggtttaaatgttctcgataaaaaacctcaagacaactaaaactatatgtacgaacatcaacgtcaatgtctaaagtaaataaatcattgtattttgtatcactatcatagtattcaatagaaatttcaccgtatctaacaaaaacaacacattttccacttagtgattcaaattttgttattttattcataaaacaatctctattatctaaaatataattaattaatttttttgtgtttaatattgttgtaatattcatttttatatctccttaatgtattttacacaaagattataagcaccttttttataaaagtttgcatcaaaataactatatattaccttagctttatttattttttcgaattgttcaatttcatgttcatatgtttcattaattgatacattgtataataatacggcagtgtatattttttccattgtttagcacctcataaaaataggggataaatatcccctatgaaattgtattaaaatgatacttgaccaaagttgattgaataacctttttgaccttttttattttcatactcataaattgtgaattgaacttcaccagcattgataatgttaacaacgtcctcgtcttgacgcatgtctttaattaattcagttaagtgattcggtaagtttacgttatagtcgtcagtgacgataacaccttgtacaccgaattttgattctttgtttgtgaataatgctctaacgatatactcttttttcataccgtatttttctactaattctgatagtttgataaattctctttctttttcctcaaattcgaatctcgctaatgtgttttggtgtcttgataaaatatcttttacgtttgtcatttttatttctcctcttatttaaattatttgctttctgcaattgcaatttgtagtaaatcattgtaataaacttgcatagttttagtatgtcgtgtagtggataaaagtttgtgtgtattaggtaataagtctttagcttgtgattttgataaatgatactcgtgaagtgggataaattcttcaacatattcatttttatcatctaaataatgaagaatataaccttttattcgtaatgtaacaatatcatcaggtttcattattatatcactcctttctaaaaaacgtaaacgttatacgtttcataaaatcctttgtgcatattccattgttctattgggtcatcaccagcaatgtaagataaaatagattctggtttagtttcgttgtttagttcatcatttaagaatttaacaacagaactattatagtttaataatagttgttggcaagctgatactaaattaatagcattgtcgaaagtataagctggattccattgaatcaacttattgaatagttgcaacatttcagtataggcttgccctttttcttcaggtgcgttatcaacattaaccattattatcactccttaaatcattgatttcattccttatttcatcaacgatttttttaagtgaattatggtctaattgttcaaaatcatccttttcaagtacaaataatgttaattcataagttgatgtattacccataacaataactatattaccattttttaaaatgtaagtttgtaaaggttgtacattttccatttgttacctccttgatttgattacatacatagtatagcaaacgtttaaaagttttgtcaatggtttttcttaaaaaagtttaaataatttaaaaatactatttaatggaagaaattagattttaaatacaaatcataaattttgataaaagtcaatagatacataaatcttgtatttgatgaatatgttataggttagataagttggaaaagtagacgtacagtttttata

What is claimed is:

1. A composition comprising a phage combination attached to a polymeric fabric,
wherein the phage combination comprises one or more sets of phages that infect one or more bacterial species,
wherein the phages are selected from Myoviridae, Podoviridae and Siphoviridae, and
wherein the polymeric fabric is selected from at least one of a polyhydroxybutyrate (PHB) or a polyethylene terephthalate (PET) nonwoven fabric.

2. The composition of claim 1, wherein the phages are of the genus Pahexavirus or Rosenblumvirus.

3. The composition of claim 1 or claim 2, wherein the phages are tailed viruses.

4. The composition of any one of claims 1-3, wherein the phages are at least one of Myoviridae or Podoviridae.

5. The composition of claim 4, wherein the phages are T4 myoviruses.

6. The composition of claim 5, wherein the phages are podoviruses.

7. The composition of any one of claims 1-6, wherein the one or more sets of phages infect at least one common target bacterial species.

8. The composition of any one of claims 1-7, wherein each set of phages comprises at least two, three, four, five, or more phages selected from one or more phage libraries,
wherein the one or more phage libraries comprise phages from one or more genera.

9. The composition of any one of claims 1-8, wherein the phage combination is noncovalently or covalently attached to the polymeric fabric.

10. The composition of claim 9, wherein the polymeric fabric is synthetic nonwoven fabric.

11. The composition of any one of claims 1-10, wherein the phage combination is deposited onto at least one material that forms at least a portion of a personal care product.

12. The composition of claim 11, wherein the personal care product is selected from a group consisting of facemasks, sanitary pads, tampons, baby diapers, adult incontinence products, or cosmetic facial pads or wipes, fingernail wipes, or patient bathing hygiene textiles.

13. The composition of any one of claims 1-12, wherein the bacterial species is commonly associated with contact dermatitis.

14. The composition of claim 13, wherein the bacterial species is selected from a skin microbiome biobank.

15. The composition of claim 14, wherein the bacterial species is from a skin microbiome isolated from a biological sample of a subject.

16. The composition of any one of claims 1-15, wherein the one or more bacterial species are selected from a population of microorganisms comprising Staphylococcus aureus, Staphylococcus argenteus, Streptococcus pyogenes, Streptococcus pneumoniae, Escherichia coli, Enterococcus faecalis, Cutibacterium acnes, Corynebacterium tuberculostearicum, or combinations thereof.

17. The composition of any one of claims 1-16, wherein the phage is an Escherichia coli infecting phage.

18. The composition of claims 1-16, wherein the phages are Staphylococcus aureus infecting phages.

19. The composition of any one of claims 1-18, wherein the polymeric fabric further comprises a fabric is selected from the group consisting of a polylactic acid (PLA), polyester (PE), polycaprolactone (PCL), acrylics, olefins, polyhydroxyalkanoates (PHA), polyhydroxybutyrate (PHB), polyethylene terephthalate (PET), polypropylene (PP), and polypropylene carbonate (PPC) nonwoven fabric.

20. A composition comprising a phage combination attached to a polymeric fabric,
wherein the phage combination comprises one or more sets of Caudoviricetes phages, and
wherein the polymeric fabric is a polyethylene terephthalate (PET) nonwoven fabric.

21. A composition comprising a phage combination attached to a polymeric fabric,
wherein the phage combination comprises at least Staphylococcus aureus infecting phages, and
wherein the polymeric fabric is selected from at least one of a polyhydroxybutyrate (PHB) or a polyethylene terephthalate (PET) nonwoven fabric.

22. A composition comprising a phage combination attached to a polymeric fabric,
wherein the phage combination comprises at least Escherichia coli infecting phages, and
wherein the polymeric fabric is selected from at least one of a polyhydroxybutyrate (PHB) or a polyethylene terephthalate (PET) nonwoven fabric.

23. A composition comprising a phage combination attached to a polymeric fabric,
wherein the phage combination comprises one or more sets of Caudoviricetes phages, and
wherein the polymeric fabric is selected from the group consisting of a polylactic acid (PLA), polyester (PE), polycaprolactone (PCL), acrylics, olefins, polyhydroxyalkanoates (PHA), polyhydroxybutyrate (PHB), polyethylene terephthalate (PET), polypropylene (PP), and polypropylene carbonate (PPC) nonwoven fabric.

24. A composition comprising a phage combination attached to a polymeric fabric, wherein the phage combination comprises one or more sets of phages that infect one or more bacterial species.

25. The composition of any one of claims 20-24, wherein the phages are of the genus Pahexavirus or Rosenblumvirus.

26. The composition of any one of claims 20-25, wherein the phages are selected from a Myoviridae, Podoviridae and Siphoviridae.

27. The composition of any one of claims 20-26, wherein the phages are tailed viruses.

28. The composition of any one of claims 20-27, wherein the phages are at least one of Myoviridae or Podoviridae.

29. The composition of claim 28, wherein the phages are T4 myoviruses.

30. The composition of claim 28, wherein the phages are podoviruses.

31. The composition of any one of claims 20-30, wherein the one or more sets of phages infect at least one common target bacterial species.

32. The composition of any one of claims 20-31, wherein each set of phages comprises at least two, three, four, five, or more phages selected from one or more phage libraries,
wherein the one or more phage libraries comprise phages from one or more genera.

33. The composition of any one of claims 20-32, wherein the phage combination is noncovalently or covalently attached to the polymeric fabric.

34. The composition of claim 24, wherein the polymeric fabric is synthetic nonwoven fabric.

35. The composition of any one of claims 20-34, wherein the phage combination is deposited onto at least one material that forms at least a portion of a personal care product that contacts human skin.

36. The composition of claim 35, wherein the personal care product is selected from a group consisting of facemasks, sanitary pads, tampons, baby diapers, adult incontinence products, or cosmetic facial pads or wipes, fingernail wipes, or patient bathing hygiene textiles.

37. The composition of any one of claims 20-36, wherein the bacterial species is commonly associated with contact dermatitis.

38. The composition of claim 37, wherein the bacterial species is selected from a skin microbiome biobank.

39. The composition of claim 37, wherein the bacterial species is from a skin microbiome isolated from a biological sample of a subject.

40. The composition of any one of claims 20 and 23-39, wherein the one or more bacterial species are selected from a population of microorganisms comprising Staphylococcus aureus, Staphylococcus argenteus, Streptococcus pyogenes, Streptococcus pneumoniae, Escherichia coli, Enterococcus faecalis, Cutibacterium acnes, Corynebacterium tuberculostearicum, or combinations thereof.

41. The composition of any one of claims 20 and 21-40, wherein the phage combination further comprises at least Escherichia coli infecting phages.

42. The composition of claims 20 and 22-40, wherein the phage combination further comprises at least Staphylococcus aureus infecting phages.

43. The composition of any one of claims 20-42, wherein the polymeric fabric is selected from the group consisting of a polylactic acid (PLA), polyester (PE), polycaprolactone (PCL), acrylics, olefins, polyhydroxyalkanoates (PHA), polyhydroxybutyrate (PHB), polyethylene terephthalate (PET), polypropylene (PP), and polypropylene carbonate (PPC) nonwoven fabric.

44. A method of selecting the phage combination of any one of claims 1-43.

45. A method of attaching the phage combination of any one of claims 1-43 to a nonwoven polymeric fabric.

46. The method of claim 45, wherein attaching the phage combination is achieved by permeating the phage capsid onto the surface of the nonwoven polymeric fabric.

47. The method of claim 46, wherein the phage capsid is absorbed to the surface of the polymeric fabric via electrostatic charge.

48. The method of claim 47, wherein the tail is exposed away from the fabric.

49. The method of any one of claims 44-48, wherein attaching the phage combination is achieved by misting, chemical bonding, physical adsorption, bulk mixing, plasma-treated surface bonding, or a combination thereof.

50. The method of any one of claims 44-49, wherein attaching the phage combination is achieved by plasma-treated surface bonding.

51. A method of preparing a personal care product, the method comprising
(a) contacting a nonwoven polymeric fabric with a composition comprising a phage combination,
wherein the phage combination comprises one or more sets of phages of Caudoviricetes phages that infect one or more bacterial species, and
wherein the nonwoven polymeric fabric is selected from at least one of a polyhydroxybutyrate (PHB) or a polyethylene terephthalate (PET) nonwoven fabric.

52. A method of preparing a personal care product, the method comprising
(a) contacting a nonwoven polymeric fabric with a plasma composition to generate a plasma-treated nonwoven fabric,
wherein the nonwoven polymeric fabric is selected from at least one of a polyhydroxybutyrate (PHB) or a polyethylene terephthalate (PET) nonwoven fabric;
(b) immobilizing a combination of phages comprising at least one or more sets of Caudoviricetes phages onto the nonwoven polymeric fabric,
wherein the phage combination comprises one or more sets of phages that infect one or more bacterial species; and
(c) incorporating the nonwoven polymeric fabric into the personal care product.

53. A nonwoven polymeric fabric comprising a phage combination attached to the polymeric fabric,
wherein the phage combination comprises one or more sets of Caudoviricetes phages that infect one or more bacterial species, and
wherein the polymeric fabric is selected from a polylactic acid (PLA), polyester (PE), acrylics, olefins, polyhydroxyalkanoates (PHA), polyhydroxybutyrate (PHB), polyethylene terephthalate (PET), polypropylene (PP) and polypropylene carbonate (PPC) nonwoven fabric.

54. Manufacturing of a personal care product for reducing contact dermatitis, reducing skin infection and/or reducing body odor, the personal care product comprising a nonwoven polymeric fabric,
wherein the nonwoven polymeric fabric comprises a phage combination attached to the nonwoven fabric selected from at least one of a polyhydroxybutyrate (PHB) or a polyethylene terephthalate (PET) nonwoven fabric, and
wherein the phage combination comprises one or more sets of Caudoviricetes phages that infect one or more bacterial species.

55. The personal care product of claim 54, wherein the personal care product is selected from a group consisting of facemasks, sanitary pads, tampons, baby diapers, adult incontinence products, or cosmetic facial pads or wipes, fingernail wipes, or patient bathing hygiene textiles.

56. The phage of the composition of any one of claims 1-43, the phage of the method of any one of claims 44-52, or the phage of the nonwoven polymeric fabric of claim 52, or the phage of the personal care product of claims 53 and 54, wherein the phage comprises a nucleic acid sequence having at least 80%, 85%, 90%, 95%, 96%, 97%, 98%, or 99% identity with any one of SEQ ID NOs.: 1-132.

57. The phage of the composition of any one of claims 1-43, the phage of the method of any one of claims 44-52, or the phage of the nonwoven polymeric fabric of claim 52, or the phage of the personal care product of claims 53 and 54, wherein the phage comprises a nucleic acid sequence having at least 95% identity with any one of SEQ ID NOs.: 1-132.

58. The phage of the composition of any one of claims 1-43, the phage of the method of any one of claims 44-52, or the phage of the nonwoven polymeric fabric of claim 52, or the phage of the personal care product of claims 53 and 54, wherein the phage comprises a nucleic acid sequence having a sequence of any one of SEQ ID NOs.: 1-132.
